(19) United States
(12) Patent Application Publication
(10) Pub. No.: US 2024/0100192 A1
(43) Pub. Date: Mar. 28, 2024

(54) PROGRAMMABLE RNA WRITING USING CRISPR EFFECTORS AND TRANS-SPLICING TEMPLATES

(71) Applicant: Massachusetts Institute of Technology, Cambridge, MA (US)

(72) Inventors: Omar Osama Abudayyeh, Cambridge, MA (US); Jonathan S. Gootenberg, Cambridge, MA (US); Wenyuan Zhou, Cambridge, MA (US); Alisan Kayabolen, Brookline, MA (US); Cian Franz Schmitt-Ulms, Cambridge, MA (US)

(21) Appl. No.: 18/455,380

(22) Filed: Aug. 24, 2023

Related U.S. Application Data
(60) Provisional application No. 63/373,519, filed on Aug. 25, 2022.

(51) Int. Cl. A61K 48/00; A61P 43/00; C12N 9/22; C12N 15/63

(52) U.S. Cl. CPC A61K 48/0066; A61P 43/00; C12N 9/22; C12N 15/63

(57) ABSTRACT

This disclosure provides systems, methods, and compositions for site specific genetic engineering comprising the use of CRISPR effectors and trans-splicing. The disclosure also relates to methods of using the systems and compositions for treating diseases as well as diagnostics.

### CROSS REFERENCE TO RELATED APPLICATION

[0001] This application claims the benefit of U.S. Provisional Patent Application Ser. No. 63/373,519, filed Aug. 25, 2022. The entire content of the above-referenced patent application is herein incorporated by reference in its entirety.

### STATEMENT REGARDING FEDERALLY SPONSORED RESEARCH OR DEVELOPMENT

[0002] This invention was made with government support under Grant Nos. 1-R56-HG011857-01 awarded by the National Institutes of Health. The government has certain rights in the invention.

### SEQUENCE LISTING

[0003] The instant application contains a Sequence Listing which has been submitted electronically in XML format and is hereby incorporated by reference in its entirety. Said XML copy, created on Oct. 30, 2023, is named 744063_083474-035_SL.xlm and is 1,201,176 bytes in size.

### FIELD

[0004] This disclosure relates to non-naturally occurring systems and compositions for site specific genetic engineering comprising the use of CRISPR effectors and trans-splicing templates. The disclosure also relates to methods of using the systems and compositions for the prevention and treatment of diseases.

### BACKGROUND

[0005] While gene editing technologies have revolutionized the ability to program DNA editing with high efficiency in diverse tissues, there remain several challenges with DNA editing, including permanent off-targets, concern for permanent correction of certain diseases, and some diseases being better targeted by other modalities than gene editing. For example, treatment of triplet repeat disorders with gene editing remains difficult, due to the difficulty of targeting repeat regions in the genome and the need to make large and precise deletions, without causing off-target genome rearrangements and other undesired effects on the genome.

[0006] RNA modifications, however, may offer a better approach with notable features: 1) temporal and reversible modification of genetic diseases, 2) minimal off-targets which are reversible and less harmful, and 3) more versatile editing beyond genome editing. For example, with triplet repeat disorders, an RNA writing strategy could allow for collapse of the repeats to the exact desired number, an approach that would be more successful than gene editing or RNA knockdown strategies that have failed. To accomplish RNA writing, which involves all possible base edits (transitions and transversions), small or large insertions, and small or large replacements (e.g., exon swapping), some approaches have been developed, such as trans-splicing, but with limited success.

[0007] Therefore, there is a need for more effective tools for gene editing and delivery.

### SUMMARY

[0008] In one aspect, the disclosure provides a composition for nucleic acid editing comprising a trans-splicing template polynucleotide comprising a cargo guide sequence complementary to a portion of an intron or exon sequence of a target RNA sequence. The trans-splicing template polynucleotide optionally further comprises an integration sequence, a 3′ splicing site sequence, a branch point sequence, and/or a polypyrimidine tract sequence, wherein each sequence is operably connected in any order. The composition further comprises a Cas7-11 enzyme sequence coupled to a guide RNA sequence that is complementary to a portion of the intron or exon sequence of the target RNA sequence that is upstream, downstream, or overlapping of the portion of the intron or exon sequence that is complementary to the cargo guide sequence.

[0009] In some embodiments, the trans-splicing template comprises a nucleic acid sequence about 80% identical, about 90% identical, about 95% identical, about 99% identical, or identical to any one of the nucleic acid sequences of SEQ ID NOS: 106-171 and 179-184.

[0010] In some embodiments, the Cas7-11 enzyme sequence comprises a nucleic acid sequence about 80% identical, about 90% identical, about 95% identical, about 99% identical, or identical to any one of the nucleic acid sequences of SEQ ID NOS: 1-18.

[0011] In some embodiments, the guide RNA comprises a nucleic acid sequence about 80% identical, about 90% identical, about 95% identical, about 99% identical, or identical to any one of the nucleic acid sequences of SEQ ID NOS: 19-105 and 205-261.

[0012] In another aspect, the disclosure provides a method of editing the target RNA sequence in a cell. The method comprises providing to the cell the trans-splicing template polynucleotide, a vector comprising the trans-splicing template polynucleotide, or a particle comprising the trans-splicing template polynucleotide. The method further comprises providing to the cell a polynucleotide translating the Cas7-11 enzyme sequence, a vector comprising a polynucleotide translating the Cas7-11 enzyme sequence, or a particle comprising a polynucleotide translating the Cas7-11 enzyme sequence. The method further comprises providing to the cell a polynucleotide expressing the guide RNA sequence, a vector comprising a polynucleotide expressing the guide RNA sequence, or a particle comprising a polynucleotide expressing the guide RNA sequence. The method further comprises editing the target RNA sequence via 3′ trans-splicing.

[0013] In another aspect, the disclosure provides a method of treating or preventing a genetically inherited disease in a subject in need thereof, the method comprises administering to the subject an effective amount of the trans-splicing template polynucleotide, a vector comprising the trans-splicing template polynucleotide, or a particle comprising the trans-splicing template polynucleotide. The method further comprises administering to the subject an effective amount of a polynucleotide translating the Cas7-11 enzyme sequence, a vector comprising a polynucleotide translating the Cas7-11 enzyme sequence, or a particle comprising a polynucleotide translating the Cas7-11 enzyme sequence. The method further comprises administering to the subject an effective amount of a polynucleotide expressing the guide RNA sequence, a vector comprising a polynucleotide expressing the guide RNA sequence, or a particle comprising a polynucleotide expressing the guide RNA sequence.

[0014] In some embodiments, the genetically inherited disease is selected from the group consisting of Meier-Gorlin syndrome; Seckel syndrome 4; Joubert syndrome 5; Leber congenital amaurosis 10; Charcot-Marie-Tooth disease, type 2; leukoencephalopathy; Usher syndrome, type 2C; spinocerebellar ataxia 28; glycogen storage disease type III; primary hyperoxaluria, type I; long QT syndrome 2; Sjögren-Larsson syndrome; hereditary fructosuria; neuroblastoma; amyotrophic lateral sclerosis type 9; Kallmann syndrome 1; limb-girdle muscular dystrophy, type 2L; familial adenomatous polyposis 1; familial type 3 hyperlipoproteinemia; Alzheimer's disease, type 1; metachromatic leukodystrophy; cancer; Uveitis; SCA1; SCA2; FUS-Amyotrophic Lateral Sclerosis (ALS); MAPT-Frontotemporal Dementia (FTD); Myotonic Dystrophy Type 1 (DM1); Diabetic Retinopathy (DR/DME); Oculopharyngeal Muscular Dystrophy (OPMD); SCA8; C90RF72-Amyotrophic Lateral Sclerosis (ALS); SOD1-Amyotrophic Lateral Sclerosis (ALS); Spinal Cord Injury (targets: mTOR, PTEN, KLF6/7, SOX11, KCC2, and growth factors); SCA6; SCA3 (Machado-Joseph Disease); Multiple system Atrophy (MSA); Treatment-resistant Hypertension; Myotonic Dystrophy Type 2 (DM2); Fragile X-associated Tremor Ataxia Syndrome (FXTAS); West Syndrome with ARX Mutation; Age-related Macular Degeneration (AMD)/Geographic Atrophy (GA); C90RF72-Frontotemporal Dementia (FTD); Facioscapulohumeral Muscular Dystrophy (FSHD); Fragile X Syndrome (FXS); Huntington's Disease; Glaucoma; Acromegaly; Achromatopsia (total color blindness); Ullrich congenital muscular dystrophy; Hereditary myopathy with lactic acidosis; X-linked spondyloepiphyseal dysplasia tarda; Neuropathic pain (Target: CPEB); Persistent Inflammation and injury pain (Target: PABP); Neuropathic pain (Target: miR-30c-5p); Neuropathic pain (Target: miR-195); Friedreich's Ataxia; Uncontrolled gout; Inflammatory pain (Target: Nav1.7 and Nav1.8); Choroideremia; Focal epilepsy; Alpha-1 Antitrypsin deficiency (AATD); Androgen Insensitivity Syndrome; Opioid-induced hyperalgesia (Target: Raf-1); Neurofibromatosis type 1; Stargardt's Disease; Dravet Syndrome; Retinitis Pigmentosa; and Parkinson's Disease.

[0015] In another aspect, the disclosure provides a composition for nucleic acid editing comprising a trans-splicing template polynucleotide comprising a cargo guide sequence complementary to a portion of an intron or exon sequence of a target RNA sequence. The trans-splicing template polynucleotide optionally further comprises an integration sequence, a 5′ splicing site sequence, an intronic signal enhancer (ISE) sequence, and/or an exonic signal enhancer (ESE) sequence, wherein each sequence is operably connected in any order. The composition further comprises a Cas7-11 enzyme sequence coupled to a guide RNA sequence that is complementary to a portion of the intron or exon sequence of the target RNA sequence that is upstream, downstream, or overlapping of the portion of the intron or exon sequence that is complementary to the cargo guide sequence.

[0016] In some embodiments, the trans-splicing template comprises a nucleic acid sequence about 80% identical, about 90% identical, about 95% identical, about 99% identical, or identical to any one of the nucleic acid sequences of SEQ ID NOS: 106-171 and 179-184.

[0017] In some embodiments, the Cas7-11 enzyme sequence comprises a nucleic acid sequence about 80% identical, about 90% identical, about 95% identical, about 99% identical, or identical to any one of the nucleic acid sequences of SEQ ID NOS: 1-18.

[0018] In some embodiments, the guide RNA comprises a nucleic acid sequence about 80% identical, about 90% identical, about 95% identical, about 99% identical, or identical to any one of the nucleic acid sequences of SEQ ID NOS: 19-105 and 205-261.

[0019] In another aspect, the disclosure provides a method of editing the target RNA sequence in a cell, the method comprising providing to the cell the trans-splicing template polynucleotide, a vector comprising the trans-splicing template polynucleotide, or a particle comprising the trans-splicing template polynucleotide. The method further comprises providing to the cell a polynucleotide translating the Cas7-11 enzyme sequence, a vector comprising a polynucleotide translating the Cas7-11 enzyme sequence, or a particle comprising a polynucleotide translating the Cas7-11 enzyme sequence. The method further comprises providing to the cell a polynucleotide expressing the guide RNA sequence, a vector comprising a polynucleotide expressing the guide RNA sequence, or a particle comprising a polynucleotide expressing the guide RNA sequence. The method further comprises editing the target RNA sequence via 5′ trans-splicing.

[0020] In another aspect, the disclosure provides a method of treating or preventing a genetically inherited disease in a subject in need thereof, the method comprising administering to the subject an effective amount of the trans-splicing template polynucleotide, a vector comprising the trans-splicing template polynucleotide, or a particle comprising the trans-splicing template polynucleotide. The method further comprises administering to the subject an effective amount of a polynucleotide translating the Cas7-11 enzyme sequence, a vector comprising a polynucleotide translating the Cas7-11 enzyme sequence, or a particle comprising a polynucleotide translating the Cas7-11 enzyme sequence. The method further comprises administering to the subject an effective amount of a polynucleotide expressing the guide RNA sequence, a vector comprising a polynucleotide expressing the guide RNA sequence, or a particle comprising a polynucleotide expressing the guide RNA sequence.

[0021] In some embodiments, the genetically inherited disease is selected from the group consisting of Meier-Gorlin syndrome; Seckel syndrome 4; Joubert syndrome 5; Leber congenital amaurosis 10; Charcot-Marie-Tooth disease, type 2; leukoencephalopathy; Usher syndrome, type 2C; spinocerebellar ataxia 28; glycogen storage disease type III; primary hyperoxaluria, type I; long QT syndrome 2; Sjögren-Larsson syndrome; hereditary fructosuria; neuroblastoma; amyotrophic lateral sclerosis type 9; Kallmann syndrome 1; limb-girdle muscular dystrophy, type 2L; familial adenomatous polyposis 1; familial type 3 hyperlipoproteinemia; Alzheimer's disease, type 1; metachromatic leukodystrophy; cancer; Uveitis; SCA1; SCA2; FUS-Amyotrophic Lateral Sclerosis (ALS); MAPT-Frontotemporal Dementia (FTD); Myotonic Dystrophy Type 1 (DM1); Diabetic Retinopathy (DR/DME); Oculopharyngeal Muscular Dystrophy (OPMD); SCA8; C90RF72-Amyotrophic Lateral Sclerosis (ALS); SOD1-Amyotrophic Lateral Sclerosis (ALS); Spinal Cord Injury (targets: mTOR, PTEN, KLF6/7, SOX11, KCC2, and growth factors); SCA6; SCA3 (Machado-Joseph Disease); Multiple system Atrophy (MSA); Treatment-resistant Hypertension; Myotonic Dystrophy Type 2 (DM2); Fragile X-associated Tremor Ataxia Syndrome (FXTAS); West Syndrome with ARX Mutation; Age-related Macular Degeneration (AMD)/Geographic Atrophy (GA); C90RF72-Frontotemporal Dementia (FTD); Facioscapulohumeral Muscular Dystrophy (FSHD); Fragile X Syndrome (FXS); Huntington's Disease; Glaucoma; Acromegaly; Achromatopsia (total color blindness); Ullrich congenital muscular dystrophy; Hereditary myopathy with lactic acidosis; X-linked spondyloepiphyseal dysplasia tarda; Neuropathic pain (Target: CPEB); Persistent Inflammation and injury pain (Target: PABP); Neuropathic pain (Target: miR-30c-5p); Neuropathic pain (Target: miR-195); Friedreich's Ataxia; Uncontrolled gout; Inflammatory pain (Target: Nav1.7 and Nav1.8); Choroideremia; Focal epilepsy; Alpha-1 Antitrypsin deficiency (AATD); Androgen Insensitivity Syndrome; Opioid-induced hyperalgesia (Target: Raf-1); Neurofibromatosis type 1; Stargardt's Disease; Dravet Syndrome; Retinitis Pigmentosa; and Parkinson's Disease.

[0022] In another aspect, the disclosure provides a composition for nucleic acid editing comprising a trans-splicing template polynucleotide comprising a first cargo guide sequence complementary to a portion of the first intron or exon sequence of a target RNA sequence and a second cargo guide sequence complementary to a portion of the second intron or exon sequence of the target RNA sequence. The trans-splicing template polynucleotide optionally further comprises an integration sequence, a 3′ splicing site sequence, a 5′ splicing site sequence, a branch point sequence, and/or a polypyrimidine tract sequence, wherein each sequence is operably connected in any order. The composition further comprises a first Cas7-11 enzyme sequence coupled to a first guide RNA sequence that is complementary to a portion of the first intron or exon sequence of the target RNA sequence that is upstream, downstream, or overlapping of the portion of the intron sequence that is complementary to the first cargo guide sequence. The composition optionally further comprises a second Cas7-11 enzyme sequence coupled to a second guide RNA sequence that is complementary to a portion of the second intron or exon sequence of the target RNA sequence that is upstream, downstream, or overlapping of the portion of the intron sequence that is complementary to the second cargo guide sequence.

[0023] In some embodiments, the trans-splicing template comprises a nucleic acid sequence about 80% identical, about 90% identical, about 95% identical, about 99% identical, or identical to any one of the nucleic acid sequences of SEQ ID NOS: 106-171 and 179-184.

[0024] In some embodiments, the Cas7-11 enzyme sequence comprises a nucleic acid sequence about 80% identical, about 90% identical, about 95% identical, about 99% identical, or identical to any one of the nucleic acid sequences of SEQ ID NOS: 1-18.

[0025] In some embodiments, the guide RNA comprises a nucleic acid sequence about 80% identical, about 90% identical, about 95% identical, about 99% identical, or identical to any one of the nucleic acid sequences of SEQ ID NOS: 19-105 and 205-261.

[0026] In another aspect, the disclosure provides a method of editing the target RNA sequence in a cell, the method comprising providing to the cell the trans-splicing template polynucleotide, a vector comprising the trans-splicing template polynucleotide, or a particle comprising the trans-splicing template polynucleotide. The method further comprises providing to the cell a polynucleotide translating the first Cas7-11 enzyme sequence, a vector comprising a polynucleotide translating the first Cas7-11 enzyme sequence, or a particle comprising a polynucleotide translating the first Cas7-11 enzyme sequence. The method further comprises providing to the cell a polynucleotide translating the second Cas7-11 enzyme sequence, a vector comprising a polynucleotide translating the second Cas7-11 enzyme sequence, or a particle comprising a polynucleotide translating the second Cas7-11 enzyme sequence. The method further comprises providing to the cell a polynucleotide expressing the guide RNA sequence, a vector comprising a polynucleotide expressing the guide RNA sequence, or a particle comprising a polynucleotide expressing the guide RNA sequence. The method further comprises editing the target RNA sequence via internal trans-splicing.

[0027] In another aspect, the disclosure provides a method of treating or preventing a genetically inherited disease in a subject in need thereof, the method comprising administering to the subject an effective amount of the trans-splicing template polynucleotide, a vector comprising the trans-splicing template polynucleotide, or a particle comprising the trans-splicing template polynucleotide. The method further comprises administering to the subject an effective amount of a polynucleotide translating the first Cas7-11 enzyme sequence, a vector comprising a polynucleotide translating the first Cas7-11 enzyme sequence, or a particle comprising a polynucleotide translating the first Cas7-11 enzyme sequence. The method further comprises administering to the subject an effective amount of a polynucleotide translating the second Cas7-11 enzyme sequence, a vector comprising a polynucleotide translating the second Cas7-11 enzyme sequence, or a particle comprising a polynucleotide translating the second Cas7-11 enzyme sequence. The method further comprises administering to the subject an effective amount of a polynucleotide expressing the guide RNA sequence, a vector comprising a polynucleotide expressing the guide RNA sequence, or a particle comprising a polynucleotide expressing the guide RNA sequence.

[0028] In some embodiments, the genetically inherited disease is selected from the group consisting of Meier-Gorlin syndrome; Seckel syndrome 4; Joubert syndrome 5; Leber congenital amaurosis 10; Charcot-Marie-Tooth disease, type 2; leukoencephalopathy; Usher syndrome, type 2C; spinocerebellar ataxia 28; glycogen storage disease type III; primary hyperoxaluria, type I; long QT syndrome 2; Sjögren-Larsson syndrome; hereditary fructosuria; neuroblastoma; amyotrophic lateral sclerosis type 9; Kallmann syndrome 1; limb-girdle muscular dystrophy, type 2L; familial adenomatous polyposis 1; familial type 3 hyperlipoproteinemia; Alzheimer's disease, type 1; metachromatic leukodystrophy; cancer; Uveitis; SCA1; SCA2; FUS-Amyotrophic Lateral Sclerosis (ALS); MAPT-Frontotemporal Dementia (FTD); Myotonic Dystrophy Type 1 (DM1); Diabetic Retinopathy (DR/DME); Oculopharyngeal Muscular Dystrophy (OPMD); SCA8; C90RF72-Amyotrophic Lateral Sclerosis (ALS); SOD1-Amyotrophic Lateral Sclerosis (ALS); Spinal Cord Injury (targets: mTOR, PTEN, KLF6/7, SOX11, KCC2, and growth factors); SCA6; SCA3 (Machado-Joseph Disease); Multiple system Atrophy (MSA); Treatment-resistant Hypertension; Myotonic Dystrophy Type 2 (DM2); Fragile X-associated Tremor Ataxia Syndrome (FXTAS); West Syndrome with ARX Mutation; Age-related Macular Degeneration (AMD)/Geographic Atrophy (GA); C90RF72-Frontotemporal Dementia (FTD); Facioscapulohumeral Muscular Dystrophy (FSHD); Fragile X Syndrome (FXS); Huntington's Disease; Glaucoma; Acromegaly; Achromatopsia (total color blindness); Ullrich congenital muscular dystrophy; Hereditary myopathy with lactic acidosis; X-linked spondyloepiphyseal dysplasia tarda; Neuropathic pain (Target: CPEB); Persistent Inflammation and injury pain (Target: PABP); Neuropathic pain (Target: miR-30c-5p); Neuropathic pain (Target: miR-195); Friedreich's Ataxia; Uncontrolled gout; Inflammatory pain (Target: Nav1.7 and Nav1.8); Choroideremia; Focal epilepsy; Alpha-1 Antitrypsin deficiency (AATD); Androgen Insensitivity Syndrome; Opioid-induced hyperalgesia (Target: Raf-1); Neurofibromatosis type 1; Stargardt's Disease; Dravet Syndrome; Retinitis Pigmentosa; and Parkinson's Disease.

[0029] These and other aspects and embodiments of the applicants' teaching are set forth herein.

### BRIEF DESCRIPTION OF THE DRAWINGS

[0030] Aspects, features, benefits and advantages of the embodiments described herein will be apparent with regard to the following description, appended claims, and accompanying drawings where:

[0031] FIG. 1 is a schematic showing a DiCas7-11-assisted 3′ trans-splicing through target transcript cleavage of a luciferase reporter;

[0032] FIG. 2 is a schematic showing a DiCas7-11-assisted 5′ trans-splicing through target transcript cleavage;

[0033] FIG. 3 is a schematic showing a DiCas7-11-assisted internal trans-splicing through target transcript cleavage;

[0034] FIG. 4A is a schematic showing a DiCas7-11-assisted 3′ trans-splicing through target transcript cleavage;

[0035] FIG. 4B is a heat chart showing a DiCas7-11-assisted 3′ trans-splicing activity (fold change of normalized Gluc luminescence) on a 5′-fragment of Gluc pre-mRNA target (1-76 aa);

[0036] FIG. 5A is a heat chart showing a DiCas7-11-assisted 3′ trans-splicing activity (fold change of normalized Gluc luminescence) on a 5′-fragment of Gluc pre-mRNA target (1-76 aa) with midi prepped plasmids and a smaller panel of Cas7-11 guides;

[0037] FIG. 5B is a heat chart showing a DiCas7-11-assisted 3′ trans-splicing activity (fold change o trans-splicing efficiency by GNS) on a 5′-fragment of Gluc pre-mRNA target (1-76 aa) with midi prepped plasmids and a smaller panel of Cas7-11 guides;

[0038] FIG. 6A is a schematic showing a DiCas7-11-assisted internal trans-splicing through target transcript cleavage;

[0039] FIG. 6B is a heat chart showing a DiCas7-11-assisted internal trans-splicing activity (Gluc/Cluc fold change) on a Gluc pre-mRNA target, with 3×STOP codon inserted to the 37-76 aa coding sequenced flanked by intron 46 and intron 48 of COL7A1 in the targeted Gluc pre-mRNA;

[0040] FIG. 6C is a heat chart showing a DiCas7-11-assisted internal trans-splicing activity (measured by NGS) on a Gluc pre-mRNA target, with 3×STOP codon inserted to the 37-76 aa coding sequenced flanked by intron 46 and intron 48 of COL7A1 in the targeted Gluc pre-mRNA;

[0041] FIG. 7A is a heat chart showing a DiCas7-11-assisted 3′ trans-splicing activity (trans-splicing efficiency % by NGS) targeting intron 2 of MALAT pre-mRNA;

[0042] FIG. 7B is a heat chart showing a DiCas7-11-assisted 3′ trans-splicing activity (trans-splicing efficiency % by NGS) targeting intron 5 of STAT3 pre-mRNA;

[0043] FIG. 8 is a heat chart showing a DiCas7-11-assisted 3′ trans-splicing activity (trans-splicing efficiency % by NGS) targeting STAT3 pre-mRNA;

[0044] FIG. 9 is an image of a gel showing the measurement of DiCas7-11-assisted 3′ trans-splicing of STAT3 via a protein-based readout according to embodiments of the present teachings;

[0045] FIG. 10A is a schematic showing a DiCas7-11-assisted 3′ trans-splicing on a 5′-fragment of Gluc pre-mRNA target with a fusion of cargo guide;

[0046] FIG. 10B is a bar graph showing a 3′ trans-splicing activity (fold change of normalized Gluc luminescence) on the 5′-fragment of Gluc pre-mRNA target with a cargo template that contains a Cas7-11 guide as well as a target binding domain (i.e., cargo guide);

[0047] FIG. 11A is a schematic showing a Cas7-11-MCP fusion protein assisted 3′ trans-splicing on a 5′-fragment of Gluc pre-mRNA target with a fusion of cargo guide and MS2 hairpin (MS2-hyb-cargo);

[0048] FIG. 11B is a schematic showing a Cas7-11-MCP fusion protein assisted 3′ trans-splicing on a 5′-fragment of Gluc pre-mRNA target with a fusion of cargo guide and MS2 hairpin (hyb-MS2-cargo);

[0049] FIG. 11C is a heat chart showing the 3′ trans-splicing activity (fold change of normalized Gluc luminescence) on the 5′-fragment of Gluc pre-mRNA target with a fusion of cargo guide and MS2 hairpin as well as Cas7-11-MCP fusion proteins;

[0050] FIG. 12A is a schematic showing a DiCas7-11-assisted internal trans-splicing through target transcript cleavage;

[0051] FIG. 12B is heat graph showing the internal trans-splicing activity (fold change of normalized Gluc luminescence) on a Gluc pre-mRNA target, with 3×STOP codon inserted to the 37-76 aa coding sequenced flanked by intron 46 and intron 48 of COL7A1 in the targeted Gluc pre-mRNA;

[0052] FIG. 12C is heat graph showing the internal trans-splicing activity (trans-splicing efficiency % by NGS) on a Gluc pre-mRNA target, with 3×STOP codon inserted to the 37-76 aa coding sequenced flanked by intron 46 and intron 48 of COL7A1 in the targeted Gluc pre-mRNA;

[0053] FIG. 13 is bar graph showing 3′ endogenous trans-splicing rates (%) for the gene STAT3 using one common cargo replacing STAT3 exon 6 and either a Cas7-11 guide RNA targeting the STAT3 intron 5 or a guide scrambled sequence;

[0054] FIG. 14 is bar graph showing 3′ endogenous trans-splicing rates (%) for the gene STAT3 using one common cargo replacing STAT3 exon 6 and a set of Cas7-11 or Cas13 guides targeting intron 5 or a scrambled sequence, arrayed around a position that induced efficient splicing for Cas7-11 constructs;

[0055] FIG. 15 is a bar graph showing 3′ endogenous trans-splicing rates (%) for the gene STAT3, using one common cargo replacing STAT3 exon 6 and a set of Cas7-11 or Cas13 guides targeting intron 5 or a scrambled sequence, arrayed around a position that induced efficient splicing for Cas7-11 constructs;

[0056] FIG. 16 is a bar graph showing 3′ endogenous trans-splicing rates (%) for the gene PABPC1 using one common cargo replacing the PABPC1 terminal exon 14 and either a PABPC1 intron 13 or scrambled guide;

[0057] FIG. 17 is a bar graph showing 3′ endogenous trans-splicing rates (%) for the gene STAT3 using one common cargo replacing the STAT3 exon 6 and either a STAT3 intron 5 or scrambled guide;

[0058] FIG. 18 is a bar graph showing 3′ endogenous trans-splicing rates (%) for the gene PPIB using one common cargo replacing the PPIB terminal exon and either a PPIB intron 4 or scrambled guide;

[0059] FIG. 19 is a bar graph showing 3′ endogenous trans-splicing rates (%) for the gene TOP2A using one common cargo replacing the TOP2A exon 21 and either a TOP2A intron 20 or scrambled guide;

[0060] FIG. 20 is a bar graph showing 3′ endogenous trans-splicing rates (%) for the gene PPIB using one common cargo replacing the PPIB terminal exon and either a PPIB intron 4 or scrambled guide;

[0061] FIG. 21 is a bar graph showing 3′ endogenous trans-splicing rates (%) for the gene STAT3 using one common cargo replacing the STAT3 exon 6 and either a STAT3 intron 5 or scrambled guide;

[0062] FIG. 22 is a bar graph showing 3′ endogenous trans-splicing rates (%) for the gene TOP2A using one common cargo replacing the TOP2A exon 21 and either a TOP2A intron 20 or scrambled guide;

[0063] FIG. 23 is a bar graph showing 3′ endogenous trans-splicing rates (%) for the gene SHANK3 using one common cargo replacing the SHANK3 exon 21 and either a SHANK3 intron 20 or scrambled guide;

[0064] FIG. 24 is a bar graph showing 3′ endogenous trans-splicing rates (%) for the gene SHANK3 using one common cargo replacing the SHANK3 exon 21 and either a SHANK3 intron 20 or scrambled guide;

[0065] FIG. 25 is a bar graph showing 5′ endogenous trans-splicing rates (%) for the gene HTT using one common cargo replacing HTT exon 1 and either a HTT intron 1 or scrambled guide;

[0066] FIG. 26 is graph showing 3′ endogenous trans-splicing rates (%) for the gene STAT3 using one common cargo replacing STAT3 exon 6 and a targeting or nontargeting guide for STAT3 intron 5;

[0067] FIG. 27 is a bar graph showing 3′ endogenous trans-splicing rates (%) for the gene STAT3 using one common cargo structure replacing STAT3 exon 6 and a targeting or nontargeting guide for STAT3 intron 5;

[0068] FIG. 28 is a bar graph showing 3′ endogenous trans-splicing rates (%) for the gene STAT3 using one common cargo structure replacing STAT3 exon 6 and a targeting or nontargeting guide for STAT3 intron 5;

[0069] FIG. 29 is a bar graph showing 3′ endogenous trans-splicing rate (%) for the gene STAT3 using one common cargo structure replacing STAT3 exon 6 and a targeting or nontargeting guide for STAT3 intron 5;

[0070] FIG. 30 is a bar graph showing 3′ endogenous trans-splicing rates (%) for the gene PPIB using one common cargo replacing the PPIB terminal exon and either a PPIB intron 4 or scrambled guide;

[0071] FIG. 31 is a bar graph showing 3′ endogenous trans-splicing rates (%) for the gene PPIB using one common cargo replacing the PPIB terminal exon and either a PPIB intron 4 or scrambled guide;

[0072] FIG. 32 is a bar graph showing 3′ endogenous trans-splicing rates (%) for the gene PPIB using one common cargo replacing the PPIB terminal exon and either a PPIB intron 4 or scrambled guide;

[0073] FIG. 33A is a heat map chart showing 3′ endogenous trans-splicing rate (%) for the genes PPIB (PP), USF1 (U), STAT3 (S), PABPC1 (PA), and TOP2A(T) edited simultaneously within the same conditions using a target guide (FIG. 33A). FIG. 33B is a non-target (NT) guide (FIG. 33B);

[0074] FIG. 34 is a bar graph showing 3′ endogenous trans-splicing rates (%) for the gene STAT3 using one common cargo structure replacing STAT3 exon 6 and a targeting or nontargeting guide for STAT3 intron 5;

[0075] FIG. 35 is a bar graph showing 3′ endogenous trans-splicing rates (%) for the gene PPIB using one common cargo replacing the PPIB terminal exon and either a PPIB intron 4 or scrambled guide;

[0076] FIG. 36 is a bar graph showing 3′ endogenous trans-splicing rates (%) for the gene PPIB using one common cargo replacing the PPIB terminal exon and either a PPIB intron 4 or scrambled guide;

[0077] FIG. 37 is a bar graph showing 3′ endogenous trans-splicing rates (%) for the gene PPIB using one common structure cargo replacing the PPIB terminal exon and either a PPIB intron 4 or scrambled guide;

[0078] FIG. 38 is a bar graph showing 3′ endogenous trans-splicing rates (%) for the gene STAT3, using one common cargo structure replacing STAT3 exon 6 and a targeting or nontargeting guide for STAT3 intron 5;

[0079] FIG. 39 is a bar graph showing 3′ endogenous trans-splicing rates (%) for the gene PPIB using one common structure cargo replacing the PPIB terminal exon and either a PPIB intron 4 or scrambled guide;

[0080] FIG. 40 is a bar graph showing 3′ endogenous trans-splicing rates (%) for the gene SHANK3, exon 21;

[0081] FIG. 41 is a bar graph showing 3′ endogenous trans-splicing rates (%) for the gene SHANK3, using one common cargo replacing the SHANK3 exon 21 and either a SHANK3 intron 20 or scrambled guide;

[0082] FIG. 42 is a bar graph showing 3′ endogenous trans-splicing rates (%) for the gene STAT3 using one common cargo structure replacing STAT3 exon 6 and a targeting or nontargeting guide for STAT3 intron 5;

[0083] FIG. 43 is a bar graph showing 3′ endogenous trans-splicing rates (%) for the genes PPIB and STAT3 either alone or edited simultaneously;

[0084] FIG. 44 is a bar graph showing 3′ endogenous trans-splicing rates (%) for the gene STAT3 using one common cargo structure replacing STAT3 exon 6 and a targeting or nontargeting guide for STAT3 intron 5;

[0085] FIG. 45 is a bar graph showing 3′ endogenous trans-splicing rates (%) for the gene SHANK3 using one common cargo structure replacing SHANK3 exon 21 and a targeting or nontargeting guide for SHANK3 intron 20;

[0086] FIG. 46 is a bar graph showing 3′ endogenous trans-splicing rates (%) for the gene STAT3 using one common cargo structure replacing STAT3 exon 6 and a targeting or nontargeting guide for STAT3 intron 5 combined on a single plasmid;

[0087] FIG. 47 is a bar graph showing 3′ endogenous trans-splicing rates (%) for the gene SHANK3 using one common cargo structure replacing SHANK3 exon 21 and a targeting or nontargeting guide for SHANK3 intron 20 combined on a single plasmid;

[0088] FIG. 48A is bar graph showing 3′ endogenous trans-splicing rate (%) for the gene STAT3 using one common cargo replacing STAT3 exon 6 and either a Cas7-11 guide RNA targeting the STAT3 intron 5 or a guide scrambled sequence;

[0089] FIG. 48B is a bar graph showing 3′ endogenous trans-splicing rates (%) for the gene PPIB using one common structure cargo replacing the PPIB terminal exon and either a PPIB intron 4 or scrambled guide with the same set of truncated spliceosome fusions;

[0090] FIG. 49 is a bar graph showing 3′ endogenous trans-splicing rates (%) for the gene SHANK3 using conventional or lentiviral vectors;

[0091] FIG. 50 is a bar graph showing 3′ endogenous trans-splicing rates (%) for the gene SHANK3 using different volumes of 2 lentiviruses either alone or in combination;

[0092] FIG. 51A is a is a Western blot image showing protein readouts of 3′ endogenous trans-splicing of PPIB gene using a cargo replacing the PPIB terminal exon and containing 1× or 3×Flag or 1×HA tags, and either a PPIB intron 4 targeting or scrambled guide RNA. Bands around 15 kDa shows background expression of the cargo, while the faint band around 25 kDa represents the product of targeted trans-splicing;

[0093] FIG. 51B is a bar graph showing 3′ endogenous trans-splicing rates (%) for the gene PPIB as a confirmation of the Western blot;

[0094] FIG. 52A is a is a Western blot image showing protein readouts of 3′ trans-splicing of USF1 gene using 4 different components. Green bands around 28 kDa shows background expression of the cargo, while red bands around 33 and 35 kDa show spliced and un-spliced reporter, respectively. The band around 55 kDa which is brighter with targeting guide represents the product of targeted trans-splicing;

[0095] FIG. 52B is a bar graph showing 3′ trans-splicing rates (%) for the gene USF1 as a confirmation of the Western blot;

[0096] FIG. 53 is a bar graph showing 3′ trans-splicing rates (%) for the gLuc gene in a reporter plasmid;

[0097] FIG. 54 is a bar graph showing 5′ splicing rates for HTT exon 1, using cargos that bind to intron 1 and a guide targeting the terminal end of the cargo hybridization or a scrambled NT sequence;

[0098] FIG. 55 is a bar graph showing 5′ splicing rate (%) for HTT exon 1, using cargo constructs with hybridization regions that bind intron 1 of the HTT premRNA and either a scrambled guide or a guide that binds and cleaves the end of the hybridization;

[0099] FIG. 56 is a bar graph showing 5′ splicing rates for HTT exon 1 using cargos that bind to intron 1 and a guide targeting the terminal end of the cargo hybridization or a scrambled NT sequence combined on a single plasmid;

[0100] FIG. 57 is a bar graph showing 5′ splicing rate for HTT exon 1, using cargos that bind to intron 1 and a guide targeting the terminal end of the cargo hybridization or a scrambled NT sequence;

[0101] FIG. 58 is a bar graph showing 5′ splicing rates for HTT exon 1 using cargos that bind to intron 1 and a guide targeting the terminal end of the cargo hybridization or a scrambled NT sequence;

[0102] FIG. 59A is a bar graph showing 5′ splicing rates for HTT exon 1 using cargos that bind to intron 1 and a guide targeting the terminal end of the cargo hybridization or a scrambled NT sequence combined on a single plasmid;

[0103] FIG. 59B is a bar graph showing 5′ splicing rates (%) for HTT gene.

[0104] FIG. 60 is a bar graph showing 5′ splicing rates (%) for USF1 exon 9 using cargo constructs with hybridization regions that bind intron 9 of the USF1 premRNA and either a scrambled guide or a guide that binds and cleaves upstream of the hybridization region;

[0105] FIG. 61A is a bar graph showing 5′ trans-splicing rates (%) for HTT exon 1 using cargo constructs with hybridization regions that bind intron 1 of the HTT premRNA and either a scrambled guide or a guide that binds and cleaves the end of the hybridization;

[0106] FIG. 61B is a bar graph showing 3′ trans-splicing of SHANK3 exon 21 with a cargo and guide binding within intron 20;

[0107] FIG. 62 is a bar graph showing 5′ splicing rates (%) for PABPC1 exon 1 using cargo constructs with hybridization regions that bind intron 1 of the PABPC1 premRNA and either a scrambled guide or a guide that binds and cleaves the end of the hybridization;

[0108] FIG. 63 is a bar graph showing 5′ trans-splicing rates (%) for RPL41 exon 1 using cargo constructs with hybridization regions that bind intron 1 of the RPL41 premRNA and either a scrambled guide or a guide that binds and cleaves the end of the hybridization;

[0109] FIG. 64 is a bar graph showing 5′ trans-splicing rates (%) for HTT exon 1 using the original cargo construct and either a scrambled guide or a guide targeting the cargo RNA or intron 1 of the HTT premRNA;

[0110] FIG. 65 is a bar graph showing 5′ splicing rates (%) for HTT exon 1 using either the original cargo construct and either a scrambled guide or a guide targeting the cargo RNA or intron 1 of the HTT premRNA;

[0111] FIG. 66 is a bar graph showing 5′ splicing rate for HTT exon 1 using cargos that bind to intron 1 and a guide targeting the terminal end of the cargo hybridization or a scrambled NT sequence combined on a single plasmid; and

[0112] FIG. 67 is a bar graph showing 5′ splicing rates (%) for HTT exon 1 using a cargo construct with a hybridization region that binds intron 1 of the HTT premRNA.

[0113] These and other aspects of the applicants' teaching are set forth herein.

### DETAILED DESCRIPTION

[0114] It will be appreciated that for clarity, the following discussion will describe various aspects of embodiments of the applicant's teachings. It should be noted that the specific embodiments are not intended as an exhaustive description or as a limitation to the broader aspects discussed herein. One aspect described in conjunction with a particular embodiment is not necessarily limited to that embodiment and can be practiced with any other embodiment(s).

[0115] The section headings used herein are for organizational purposes only and are not to be construed as limiting the subject matter described.

### Definitions

[0116] Unless defined otherwise, technical and scientific terms used herein have the same meaning as commonly understood by one of ordinary skill in the art to which this disclosure pertains. Definitions of common terms and techniques in molecular biology may be found in Molecular Cloning: A Laboratory Manual, 2nd edition (1989) (Sambrook, Fritsch, and Maniatis); Molecular Cloning: A Laboratory Manual, 4th edition (2012) (Green and Sambrook); Current Protocols in Molecular Biology (1987) (F. M. Ausubel et al. eds.); the series Methods in Enzymology (Academic Press, Inc.): PCR 2: A Practical Approach (1995) (M. J. MacPherson, B. D. Hames, and G. R. Taylor eds.): Antibodies, A Laboratory Manual (1988) (Harlow and Lane, eds.): Antibodies A Laboratory Manual, 2nd edition 2013 (E. A. Greenfield ed.); Animal Cell Culture (1987) (R.I. Freshney, ed.); Benjamin Lewin, Genes IX, published by Jones and Bartlet, 2008 (ISBN 0763752223); Kendrew et al. (eds.), The Encyclopedia of Molecular Biology, published by Blackwell Science Ltd., 1994 (ISBN 0632021829); Robert A. Meyers (ed.), Molecular Biology and Biotechnology: a Comprehensive Desk Reference, published by VCH Publishers, Inc., 1995 (ISBN 9780471185710); Singleton et al., Dictionary of Microbiology and Molecular Biology 2nd ed., J. Wiley & Sons (New York, N.Y. 1994), March, Advanced Organic Chemistry Reactions, Mechanisms and Structure 4th ed., John Wiley & Sons (New York, N.Y. 1992); and Marten H. Hofker and Jan van Deursen, Transgenic Mouse Methods and Protocols, 2nd edition (2011).

[0117] As used herein, the singular forms “a”, “an,” and “the” include both singular and plural referents unless the context clearly dictates otherwise.

[0118] The term “optional” or “optionally” means that the subsequent described event, circumstance, or substituent may or may not occur, and that the description includes instances where the event or circumstance occurs and instances where it does not.

[0119] The recitation of numerical ranges by endpoints includes all numbers and fractions subsumed within the respective ranges, as well as the recited endpoints.

[0120] The terms “about” or “approximately” as used herein when referring to a measurable value such as a parameter, an amount, a temporal duration, and the like, are meant to encompass variations of and from the specified value, such as variations of +/−10% or less, +/−5% or less, +/−1% or less, +/−0.5% or less, and +/−0.1% or less of and from the specified value, insofar such variations are appropriate to perform in the disclosed disclosure. It is to be understood that the value to which the modifier “about” or “approximately” refers is itself also specifically, and preferably, disclosed.

[0121] As used herein, the terms “operably connected” and “operably linked” are used interchangeably and refer to a linkage of polynucleotide sequence elements or polypeptide sequence elements in a functional relationship. For example, a polynucleotide sequence is operably connected when it is placed into a functional relationship with another polynucleotide sequence. In some embodiments, a transcription regulatory polynucleotide sequence e.g., a promoter, enhancer, or other expression control element is operably-linked to a polynucleotide sequence that encodes a protein if it affects the transcription of the polynucleotide sequence that encodes the protein.

[0122] The determination of “percent identity” between two sequences (e.g., polypeptide or polynucleotides) can be accomplished using a mathematical algorithm. A specific, non-limiting example of a mathematical algorithm utilized for the comparison of two sequences is the algorithm of Karlin S & Altschul S F (1990) PNAS 87: 2264-2268, modified as in Karlin S & Altschul S F (1993) PNAS 90: 5873-5877, each of which is herein incorporated by reference in its entirety. Such an algorithm is incorporated into the NBLAST and XBLAST programs of Altschul S F et al., (1990) J Mol Biol 215: 403, which is herein incorporated by reference in its entirety. BLAST nucleotide searches can be performed with the NBLAST nucleotide program parameters set, e.g., for score=100, wordlength=12 to obtain nucleotide sequences homologous to a nucleic acid molecule described herein. BLAST protein searches can be performed with the XBLAST program parameters set, e.g., to score 50, wordlength=3 to obtain amino acid sequences homologous to a protein molecule described herein. To obtain gapped alignments for comparison purposes, Gapped BLAST can be utilized as described in Altschul S F et al., (1997) Nuc Acids Res 25: 3389-3402, which is herein incorporated by reference in its entirety. Alternatively, PSI BLAST can be used to perform an iterated search which detects distant relationships between molecules (Id.). When utilizing BLAST, Gapped BLAST, and PSI Blast programs, the default parameters of the respective programs (e.g., of XBLAST and NBLAST) can be used (See, e.g., National Center for Biotechnology Information (NCBI) on the worldwide web, ncbi.nlm.nih.gov). Another specific, non-limiting example of a mathematical algorithm utilized for the comparison of sequences is the algorithm of Myers and Miller, 1988, CABIOS 4:11-17, which is herein incorporated by reference in its entirety. Such an algorithm is incorporated in the ALIGN program (version 2.0) which is part of the GCG sequence alignment software package. When utilizing the ALIGN program for comparing amino acid sequences, a PAM120 weight residue table, a gap length penalty of 12, and a gap penalty of 4 can be used. The percent identity between two sequences can be determined using techniques similar to those described above, with or without allowing gaps. In calculating percent identity, typically only exact matches are counted.

[0123] As used herein the term “pharmaceutical composition” means a composition that is suitable for administration to an animal, e.g., a human subject, and comprises a therapeutic agent and a pharmaceutically acceptable carrier or diluent. A “pharmaceutically acceptable carrier or diluent” means a substance for use in contact with the tissues of human beings and/or non-human animals without excessive toxicity, irritation, allergic response, or other problem or complication, commensurate with a reasonable therapeutic benefit/risk ratio.

[0124] The terms “polynucleotide,” “nucleic acid,” and “nucleic acid molecule” are used interchangeably herein and refer to a polymer of DNA or RNA. The nucleic acid molecule can be single-stranded or double-stranded; contain natural, non-natural, or altered nucleotides; and contain a natural, non-natural, or altered internucleotide linkage, such as a phosphoroamidate linkage or a phosphorothioate linkage, instead of the phosphodiester found between the nucleotides of an unmodified nucleic acid molecule. Nucleic acid molecules include, but are not limited to, all nucleic acid molecules which are obtained by any means available in the art, including, without limitation, recombinant means, e.g., the cloning of nucleic acid molecules from a recombinant library or a cell genome, using ordinary cloning technology and polymerase chain reaction, and the like, and by synthetic means. The skilled artisan will appreciate that, except where otherwise noted, nucleic acid sequences set forth in the instant application will recite thymidine (T) in a representative DNA sequence but where the sequence represents RNA (e.g., mRNA), the thymidines (Ts) would be substituted for uracils (Us). Thus, any of the RNA polynucleotides encoded by a DNA identified by a particular sequence identification number may also comprise the corresponding RNA (e.g., mRNA) sequence encoded by the DNA, where each thymidine (T) of the DNA sequence is substituted with uracil (U).

[0125] The terms “protein” and “polypeptide” are used interchangeably herein and refer to a polymer of at least two amino acids linked by a peptide bond.

[0126] As used herein, the term “RNA” or “RNA polynucleotide” refers to macromolecules that include multiple ribonucleotides that are polymerized via phosphodiester bonds. Ribonucleotides are nucleotides in which the sugar is ribose. RNA may contain modified nucleotides; and contain natural, non-natural, or altered internucleotide linkages, such as a phosphoroamidate linkage or a phosphorothioate linkage, instead of the phosphodiester found between the nucleotides of an unmodified nucleic acid molecule.

[0127] A “therapeutically effective amount” of a therapeutic agent (e.g., a composition or system described herein) refers to any amount of the therapeutic agent that, when used alone or in combination with another therapeutic agent, protects a subject against the onset of a disease or promotes disease regression evidenced by a decrease in severity of disease symptoms, an increase in frequency and duration of disease symptom-free periods, or a prevention of impairment or disability due to the disease affliction. The ability of a therapeutic agent to promote disease regression can be evaluated using a variety of methods known to the skilled practitioner, such as in human subjects during clinical trials, in animal model systems predictive of efficacy in humans, or by assaying the activity of the agent in in vitro assays.

[0128] As used herein, the terms “treat,” treating,” “treatment,” and the like refer to reducing or ameliorating a disease and/or symptom(s) associated therewith or obtaining a desired pharmacologic and/or physiologic effect. It will be appreciated that, although not precluded, treating a disease does not require that the disease, or symptom(s) associated therewith be completely eliminated. In some embodiments, the effect is therapeutic, i.e., without limitation, the effect partially or completely reduces, diminishes, abrogates, abates, alleviates, decreases the intensity of, or cures a disease and/or adverse symptom attributable to the disease. In some embodiments, the effect is preventative, i.e., the effect protects or prevents an occurrence or reoccurrence of a disease. To this end, the presently disclosed methods comprise administering a therapeutically effective amount of a compositions as described herein.

[0129] As used herein, the term “functional fragment” in reference to a protein refers to a fragment of a reference protein that retains at least one particular function. For example, a functional fragment of an aptamer binding protein can refer to a fragment of the protein that retains the ability to bind the cognate aptamer. Not all functions of the reference protein need be retained by a functional fragment of the protein. In some instances, one or more functions are selectively reduced or eliminated.

[0130] Compositions and Systems

[0131] The present disclosure provides (non-naturally occurring or engineered) systems for editing a nucleic acid such as a gene or a product thereof (e.g., the encoded RNA or protein). In some embodiments, the systems may be an engineered, non-naturally occurring system suitable for modifying post-translational modification sites on proteins encoded by a target nucleic acid sequence. In certain cases, the target nucleic acid sequence is RNA, e.g., mRNA or a fragment thereof. In certain cases, the target nucleic acid sequence is DNA, e.g., a gene or a fragment thereof. In general, the system may comprise, for example and without limitation, one or more Cas protein (e.g., Cas7-11) or/and catalytic inactive (dead) Cas protein (e.g., dead Cas7-11), one or more guide molecules (e.g., guide RNA), and one or more template (e.g., trans-splicing template). The guide sequence may be designed to have a degree of complementarity with a target sequence.

[0132] CRISPR-Cas

[0133] Some embodiments disclosed herein are directed to CRISPR-Cas (clustered regularly interspaced short palindromic repeats associated proteins) systems. In the conflict between bacterial hosts and their associated viruses, CRISPR-Cas systems provide an adaptive defense mechanism that utilizes programmed immune memory. CRISPR-Cas systems provide their defense through three stages: adaptation, the integration of short nucleic acid sequences into the CRISPR array that serves as memory of past infections; expression, the transcription of the CRISPR array into a pre-crRNA (CRISPR RNA) transcript and processing of the pre-crRNA into functional crRNA species targeting foreign nucleic acids; and interference, the programming of CRISPR effectors by crRNA to cleave nucleic acid of foreign threats. Across all CRISPR-Cas systems, these fundamental stages display enormous variation, including the identity of the target nucleic acid (either RNA, DNA, or both) and the diverse domains and proteins involved in the effector ribonucleoprotein complex of the system.

[0134] CRISPR-Cas systems can be broadly split into two classes based on the architecture of the effector modules involved in pre-crRNA processing and interference. Class 1 systems have multi-subunit effector complexes composed of many proteins, whereas Class 2 systems rely on single-effector proteins with multi-domain capabilities for crRNA binding and interference; Class 2 effectors often provide pre-crRNA processing activity as well. Class 1 systems contain 3 types (type I, III, and IV) and 33 subtypes, including the RNA and DNA targeting type III-systems. Class 2 CRISPR families encompass 3 types (type II, V, and VI) and 17 subtypes of systems, including the RNA-guided DNases Cas9 and Cas12 and the RNA-guided RNase Cas13. Continual sequencing of novel bacterial genomes and metagenomes uncovers new diversity of CRISPR-Cas systems and their evolutionary relationships, necessitating experimental work that reveals the function of these systems and develops them into new tools.

[0135] Among the currently known CRISPR-Cas systems, only the type III and type VI systems have been demonstrated to bind and target RNA, and these two systems have substantially different properties, the most distinguishing being their membership in Class 1 and Class 2, respectively. Characterized subtypes of type III, which span type III-A, B, and C systems, target both RNA and DNA species through an effector complex containing multiple Cas7 (Csm3/5 or Cmr1/4/6) RNA nuclease units in association with a single Cas10 (Csm1 or Cmr2) DNA nuclease. The RNA nuclease activity of Cas7 is mediated through acidic residues in the repeat-associated mysterious proteins (RAMP) domains, which cut at stereotyped intervals in the guide:target duplex. Type III systems also have a target restriction and cannot efficiently target protospacers in vivo if there is extended homology between the 5′ “tag” of the crRNA and the “anti-tag” 3′ of the protospacer in the target, although this binding does not block RNA cleavage in vitro. In type III systems, pre-crRNA processing is carried out by either host factors or the associated Cas6 family protein, which can physically complex with the effector machinery.

[0136] In contrast to type III systems, type VI systems contain a single CRISPR effector Cas13 that can only affect RNA interference, mediated through basic catalytic residues of dual HEPN domains. This interference requires a protospacer flanking sequence (PFS), although the influence of the PFS varies between orthologs and families. Importantly, the RNA cleavage activity of Cas13, once triggered by crRNA:target duplex formation, is indiscriminate, and activated Cas13 enzymes will cleave other RNA species in vitro, in bacterial hosts, and mammalian cells. This activity, termed the collateral effect, has been applied to CRISPR-based nucleic acid detection technologies. In addition to the RNA interference activity, the Cas13 family members contain pre-crRNA processing activity. Just as single-effector DNA targeting systems have given rise to numerous genome editing applications, Cas13 family members have been applied to a suite of RNA-targeting technologies in both bacterial and eukaryotic cells, including RNA knockdown, RNA editing, RNA tracking, epitranscriptome editing, translational upregulation, epi-transcriptomic reading and writing via N6-Methyladenosine, and isoform modulation.

[0137] The novel type III-E system was recently identified from genomes of 8 bacterial species and is characterized as a fusion of several Cas7 proteins and a putative Cas11 (Csm2)-like small subunit. The domain composition suggests the fusion of multiple type III effector module domains involved in crRNA binding into a single protein effector that is predicted to process pre-crRNA given its homology with Cas5 (Csm4) and conserved aspartates. The lack of other putative effector nucleases in these CRISPR loci raise the additional possibility that this fusion protein is capable of crRNA-directed RNA cleavage. If so, this system would blur the distinction of Class 1 and Class 2 systems, as it would have domains homologous to other Class 1 systems and possess a single effector module characteristic of Class 2 systems. Beyond the single effector module present in all subtype III-E loci, a majority of type III-E family members contain a putative ancillary gene with a CHAT domain, which is a caspase family protease associated with programmed cell death (PCD), suggesting involvement of PCD-mediated antiviral strategies, as has been observed with type III and VI systems.

[0138] Type III-E system associated effector is a programmable RNase. This system can provide defense against RNA phage and be programmed to target exogenous mRNA species when expressed heterologously in bacteria. Orthologs of Cas7-11 are capable of both processing of pre-crRNA and crRNA-directed cleavage of RNA targets and determine catalytic residues underlying programmed RNA cleavage. A direct evolutionary path of Cas7-11 can be traced from individual Cas7 and Cas11 effector proteins of subtype III-D1 variant, through an intermediate, a partially fused effector Cas7×3 of the subtype III-D2 variant, to the singe-effector architecture of subtype III-E that is so far unique among the Class 1 CRISPR-Cas systems. Cas7-11 most likely originated from two type III-D variants. Three Cas7 domains (domains 3, 4 and 5) are derived from subtype III-D2 that contains the Cas7×3 effector protein along with Cas10 and another Cas7-like domain fused to a Cas5-like domain. The origin of the N-terminal Cas7 and putative Cas11 domain of Cas7-11 is most likely derived from a III-D1 variant, where both genes are stand-alone.

[0139] Cas7-11 differs from Cas13, in terms of both domain organization and activity. Cas13 RNA cleavage is enacted by dual HEPN domains with basic catalytic residues, and this cleavage, once triggered, is indiscriminate. In contrast, Cas7-11 utilizes at least two of four Cas7-like domains with acidic catalytic residues to generate stereotyped cleavage at the target binding site in cis. Furthermore, Cas13 targeting is restricted by the requirement for a PFS, which Cas7-11 does not require, and the DR of Cas7-11-associated crRNA is substantially shorter. Because of these unique features, Cas7-11 may have distinct advantages for RNA targeting and transcriptome engineering biotechnology applications.

[0140] Regulation of interference by accessory proteins has been observed in both type III and type VI systems, and other proteins in the D. ishimotonii type III-E locus can regulate activity of DisCas7-11a. Notably, TPR-CHAT had a strong inhibitory effect on DisCas7-11a phage interference, raising the possibility that unrestricted DisCas7-11a activity could be detrimental for the host. Alternatively, as TPR-CHAT is a caspase family protease associated with programmed cell death (PCD), it is possible that TPR-CHAT is activated by DisCas7-11a and leads to host death, which could mimic death due to phage in these assays. TPR-CHAT caspase activity could be activated by DisCas7-11a and cause PCD through general proteolysis, analogous to PCD triggered by Cas13 collateral activity.

[0141] Similar to Class 2 CRISPR effectors such as Cas9, Cas12, and Cas13, Cas7-11 is highly active in mammalian cells, with substantial knockdown activity on both reporter and endogenous transcripts. Moreover, via inactivation of active sites through mutagenesis, the catalytically inactive dCas7-11 enzyme can be used to recruit ADAR2DD for efficient site-specific A-to-I editing on transcripts. These applications establish Cas7-11 as the basis for an RNA-targeting toolbox that has several benefits compared to Cas13, including the lack of sequence preferences and collateral activity, the latter of which has been shown to induce toxicity in certain cell types. A Cas7-11 toolbox may serve as the basis for multiple RNA technologies, including RNA knockdown, RNA editing, translation modulation, RNA recruitment, RNA tracking, splicing control, RNA stabilization, and potentially even diagnostics.

[0142] CRISPR-Cas Proteins and Guides

[0143] In some embodiments, the system comprises one or more components of a CRISPR-Cas system. For example, the system may comprise a Cas protein, a guide molecule, or a combination thereof.

[0144] In the methods and systems of the present disclosure use is made of a CRISPR-Cas protein and corresponding guide molecule. More particularly, the CRISPR-Cas protein is a class 2 CRISPR-Cas protein. In certain embodiments, said CRISPR-Cas protein is a Cas7-11. The Cas7-11 may be Cas7-11a, Cas7-11b, Cas7-11c, or Cas7-11d. The CRISPR-Cas system does not require the generation of customized proteins to target specific sequences but rather a single Cas protein can be programmed by guide molecule to recognize a specific nucleic acid target, in other words the Cas enzyme protein can be recruited to a specific nucleic acid target locus of interest using said guide molecule.

[0145] CRISPR-Cas Proteins

[0146] In some embodiments, the systems may comprise a CRISPR-Cas protein. In certain examples, the CRISPR-Cas protein may be a catalytically inactive (dead) Cas protein. The catalytically inactive (dead) Cas protein may have impaired (e.g., reduced or no) nuclease activity. In some cases, the dead Cas protein may have nickase activity. In some cases, the dead Cas protein may be dead Cas 15 protein. For example, the dead Cas 15 may be dead Cas7-11a, dead Cas7-11b, dead Cas7-11c, or dead Cas7-11d. In some embodiments, the system may comprise a nucleotide sequence encoding the dead Cas protein.

[0147] In its unmodified form, a CRISPR-Cas protein is a catalytically active protein. This implies that upon formation of a nucleic acid-targeting complex (comprising a guide RNA hybridized to a target sequence) one or both DNA strands in or near (e.g., within 1, 2, 3, 4, 5, 6, 7, 8, 9, 10, 20, 50, or more base pairs from) the target sequence is modified (e.g., cleaved). As used herein the term “sequence(s) associated with a target locus of interest” refers to sequences near the vicinity of the target sequence (e.g., within 1, 2, 3, 4, 5, 6, 7, 8, 9, 10, 20, 50, or more base pairs from the target sequence, wherein the target sequence is comprised within a target locus of interest). The unmodified catalytically active Cas7-11 protein generates a staggered cut, whereby the cut sites are typically within the target sequence. More particularly, the staggered cut is typically 13-23 nucleotides distal to the PAM. In particular embodiments, the cut on the non-target strand is 17 nucleotides downstream of the PAM (i.e. between nucleotide 17 and 18 downstream of the PAM), while the cut on the target strand (i.e. strand hybridizing with the guide sequence) occurs a further 4 nucleotides further from the sequence complementary to the PAM (this is 21 nucleotides upstream of the complement of the PAM on the 3′ strand or between nucleotide 21 and 22 upstream of the complement of the PAM).

[0148] In the methods according to the present disclosure, the CRISPR-Cas protein is preferably mutated with respect to a corresponding wild-type enzyme such that the mutated CRISPR-Cas protein lacks the ability to cleave one or both DNA strands of a target locus containing a target sequence. In particular embodiments, one or more catalytic domains of the Cas7-11 protein are mutated to produce a mutated Cas protein which cleaves only one DNA strand of a target sequence.

[0149] In particular embodiments, the CRISPR-Cas protein may be mutated with respect to a corresponding wild-type enzyme such that the mutated CRISPR-Cas protein lacks substantially all DNA cleavage activity. In some embodiments, a CRISPR-Cas protein may be considered to substantially lack all DNA and/or RNA cleavage activity when the cleavage activity of the mutated enzyme is about no more than 25%, 10%, 5%, 1%, 0.1%, 0.01%, or less of the nucleic acid cleavage activity of the non-mutated form of the enzyme; an example can be when the nucleic acid cleavage activity of the mutated form is nil or negligible as compared with the non-mutated form.

[0150] In certain embodiments of the methods provided herein the CRISPR-Cas protein is a mutated CRISPR-Cas protein which cleaves only one DNA strand, i.e., a nickase. More particularly, in the context of the present disclosure, the nickase ensures cleavage within the non-target sequence, i.e., the sequence which is on the opposite DNA strand of the target sequence and 3′ of the PAM sequence.

[0151] In some embodiments, a CRISPR-Cas protein is considered to substantially lack all DNA cleavage activity when the DNA cleavage activity of the mutated enzyme is about no more than 25%, 10%, 5%, 1%, 0.1%, 0.01%, or less of the DNA cleavage activity of the non-mutated form of the enzyme; an example can be when the DNA cleavage activity of the mutated form is nil or negligible as compared with the non-mutated form. In these embodiments, the CRISPR-Cas protein is used as a generic DNA binding protein. The mutations may be artificially introduced mutations or gain- or loss-of-function mutations.

[0152] In addition to the mutations described above, the CRISPR-Cas protein may be additionally modified. As used herein, the term “modified” with regard to a CRISPR-Cas protein generally refers to a CRISPR-Cas protein having one or more modifications or mutations (including point mutations, truncations, insertions, deletions, chimeras, fusion proteins, etc.) compared to the wild type Cas protein from which it is derived. A modification by truncation can refer to an engineered truncation that is based on structure function analysis and not naturally occurring. By derived is meant that the derived enzyme is largely based, in the sense of having a high degree of sequence homology with, a wildtype enzyme, but that it has been mutated (modified) in some way as known in the art or as described herein. The modification can be fusions of effectors like fluorophore, proteins involved in translation modulation (e.g., eIF4E, eIF4A, and eIF4G) and proteins involved with epitranscriptomic modulation (e.g., pseudouridine synthase and m6a writer/readers), and splicing factors involved with changing splicing. Cas7-11 could also be used for sensing RNA for diagnostic purposes.

[0153] In some embodiments, the C-terminus of the Cas7-11 effector can be truncated. For example, at least 1 amino acid, at least 2 amino acids, at least 3 amino acids, at least 4 amino acids, at least 5 amino acids, at least 6 amino acids, at least 7 amino acids, at least 8 amino acids, at least 9 amino acids, at least 10 amino acids, at least 15 amino acids, at least 20 amino acids, at least 40 amino acids, at least 50 amino acids, at least 60 amino acids, at least 80 amino acids, at least 100 amino acids, at least 120 amino acids, at least 140 amino acids, at least 150 amino acids, at least 160 amino acids, at least 180 amino acids, at least 200 amino acids, at least 220 amino acids, at least 240 amino acids, at least 250 amino acids, at least 260 amino acids, at least 300 amino acids, at least 350 amino acids, or any ranges that are made of any two or more points in the above list may be truncated at the C-terminus of the Cas7-11 effector. For example, up to 120 amino acids, up to 140 amino acids, up to 160 amino acids, up to 180 amino acids, up to 200 amino acids, up to 250 amino acids, up to 300 amino acids, up to 350 amino acids, up to 400 amino acids, or any ranges that are made of any two or more points in the above list may be truncated at the C-terminus of the Cas7-11 effector.

[0154] In some embodiments, the N-terminus of the Cas7-11 effector protein may be truncated. For example, at least 1 amino acid, at least 2 amino acids, at least 3 amino acids, at least 4 amino acids, at least 5 amino acids, at least 6 amino acids, at least 7 amino acids, at least 8 amino acids, at least 9 amino acids, at least 10 amino acids, at least 15 amino acids, at least 20 amino acids, at least 40 amino acids, at least 50 amino acids, at least 60 amino acids, at least 80 amino acids, at least 100 amino acids, at least 120 amino acids, at least 140 amino acids, at least 150 amino acids, at least 160 amino acids, at least 180 amino acids, at least 200 amino acids, at least 220 amino acids, at least 240 amino acids, at least 250 amino acids, at least 260 amino acids, at least 300 amino acids, at least 350 amino acids, or any ranges that are made of any two or more points in the above list may be truncated at the N-terminus of the Cas7-11 effector. For examples, up to 120 amino acids, up to 140 amino acids, up to 160 amino acids, up to 180 amino acids, up to 200 amino acids, up to 250 amino acids, up to 300 amino acids, up to 350 amino acids, up to 400 amino acids, or any ranges that are made of any two or more points in the above list may be truncated at the N-terminus of the Cas7-11 effector.

[0155] In some embodiments, both the N- and the C-termini of the Cas7-11 effector protein may be truncated. For example, at least 20 amino acids may be truncated at the C-terminus of the Cas7-11 effector, and at least 20 amino acids, at least 40 amino acids, at least 60 amino acids, at least 80 amino acids, at least 100 amino acids, at least 120 amino acids, at least 140 amino acids, at least 160 amino acids, at least 180 amino acids, at least 200 amino acids, at least 220 amino acids, at least 240 amino acids, at least 260 amino acids, at least 300 amino acids, or at least 350 amino acids may be truncated at the N-terminus of the Cas7-11 effector. For example, at least 40 amino acids may be truncated at the C-terminus of the Cas7-11 effector, and at least 20 amino acids, at least 40 amino acids, at least 60 amino acids, at least 80 amino acids, at least 100 amino acids, at least 120 amino acids, at least 140 amino acids, at least 160 amino acids, at least 180 amino acids, at least 200 amino acids, at least 220 amino acids, at least 240 amino acids, at least 260 amino acids, at least 300 amino acids, or at least 350 amino acids may be truncated at the N-terminus of the Cas7-11 effector. For example, at least 60 amino acids may be truncated at the C-terminus of the Cas7-11 effector, and at least 20 amino acids, at least 40 amino acids, at least 60 amino acids, at least 80 amino acids, at least 100 amino acids, at least 120 amino acids, at least 140 amino acids, at least 160 amino acids, at least 180 amino acids, at least 200 amino acids, at least 220 amino acids, at least 240 amino acids, at least 260 amino acids, at least 300 amino acids, or at least 350 amino acids may be truncated at the N-terminus of the Cas7-11 effector. For example, at least 80 amino acids may be truncated at the C-terminus of the Cas7-11 effector, and at least 20 amino acids, at least 40 amino acids, at least 60 amino acids, at least 80 amino acids, at least 100 amino acids, at least 120 amino acids, at least 140 amino acids, at least 160 amino acids, at least 180 amino acids, at least 200 amino acids, at least 220 amino acids, at least 240 amino acids, at least 260 amino acids, at least 300 amino acids, or at least 350 amino acids may be truncated at the N-terminus of the Cas7-11 effector. For example, at least 100 amino acids may be truncated at the C-terminus of the Cas7-11 effector, and at least 20 amino acids, at least 40 amino acids, at least 60 amino acids, at least 80 amino acids, at least 100 amino acids, at least 120 amino acids, at least 140 amino acids, at least 160 amino acids, at least 180 amino acids, at least 200 amino acids, at least 220 amino acids, at least 240 amino acids, at least 260 amino acids, at least 300 amino acids, or at least 350 amino acids may be truncated at the N-terminus of the Cas7-11 effector. For example, at least 120 amino acids may be truncated at the C-terminus of the Cas7-11 effector, and at least 20 amino acids, at least 40 amino acids, at least 60 amino acids, at least 80 amino acids, at least 100 amino acids, at least 120 amino acids, at least 140 amino acids, at least 160 amino acids, at least 180 amino acids, at least 200 amino acids, at least 220 amino acids, at least 240 amino acids, at least 260 amino acids, at least 300 amino acids, or at least 350 amino acids may be truncated at the N-terminus of the Cas7-11 effector. For example, at least 140 amino acids may be truncated at the C-terminus of the Cas7-11 effector, and at least 20 amino acids, at least 40 amino acids, at least 60 amino acids, at least 80 amino acids, at least 100 amino acids, at least 120 amino acids, at least 140 amino acids, at least 160 amino acids, at least 180 amino acids, at least 200 amino acids, at least 220 amino acids, at least 240 amino acids, at least 260 amino acids, at least 300 amino acids, or at least 350 amino acids may be truncated at the N-terminus of the Cas7-11 effector. For example, at least 160 amino acids may be truncated at the C-terminus of the Cas7-11 effector, and at least 20 amino acids, at least 40 amino acids, at least 60 amino acids, at least 80 amino acids, at least 100 amino acids, at least 120 amino acids, at least 140 amino acids, at least 160 amino acids, at least 180 amino acids, at least 200 amino acids, at least 220 amino acids, at least 240 amino acids, at least 260 amino acids, at least 300 amino acids, or at least 350 amino acids may be truncated at the N-terminus of the Cas7-11 effector. For example, at least 180 amino acids may be truncated at the C-terminus of the Cas7-11 effector, and at least 20 amino acids, at least 40 amino acids, at least 60 amino acids, at least 80 amino acids, at least 100 amino acids, at least 120 amino acids, at least 140 amino acids, at least 160 amino acids, at least 180 amino acids, at least 200 amino acids, at least 220 amino acids, at least 240 amino acids, at least 260 amino acids, at least 300 amino acids, or at least 350 amino acids may be truncated at the N-terminus of the Cas7-11 effector. For example, at least 200 amino acids may be truncated at the C-terminus of the Cas7-11 effector, and at least 20 amino acids, at least 40 amino acids, at least 60 amino acids, at least 80 amino acids, at least 100 amino acids, at least 120 amino acids, at least 140 amino acids, at least 160 amino acids, at least 180 amino acids, at least 200 amino acids, at least 220 amino acids, at least 240 amino acids, at least 260 amino acids, at least 300 amino acids, or at least 350 amino acids may be truncated at the N-terminus of the Cas7-11 effector. For example, at least 220 amino acids may be truncated at the C-terminus of the Cas7-11 effector, and at least 20 amino acids, at least 40 amino acids, at least 60 amino acids, at least 80 amino acids, at least 100 amino acids, at least 120 amino acids, at least 140 amino acids, at least 160 amino acids, at least 180 amino acids, at least 200 amino acids, at least 220 amino acids, at least 240 amino acids, at least 260 amino acids, at least 300 amino acids, or at least 350 amino acids may be truncated at the N-terminus of the Cas7-11 effector. For example, at least 240 amino acids may be truncated at the C-terminus of the Cas7-11 effector, and at least 20 amino acids, at least 40 amino acids, at least 60 amino acids, at least 80 amino acids, at least 100 amino acids, at least 120 amino acids, at least 140 amino acids, at least 160 amino acids, at least 180 amino acids, at least 200 amino acids, at least 220 amino acids, at least 240 amino acids, at least 260 amino acids, at least 300 amino acids, or at least 350 amino acids may be truncated at the N-terminus of the Cas7-11 effector. For example, at least 260 amino acids may be truncated at the C-terminus of the Cas7-11 effector, and at least 20 amino acids, at least 40 amino acids, at least 60 amino acids, at least 80 amino acids, at least 100 amino acids, at least 120 amino acids, at least 140 amino acids, at least 160 amino acids, at least 180 amino acids, at least 200 amino acids, at least 220 amino acids, at least 240 amino acids, at least 260 amino acids, at least 300 amino acids, or at least 350 amino acids may be truncated at the N-terminus of the Cas7-11 effector. For example, at least 280 amino acids may be truncated at the C-terminus of the Cas7-11 effector, and at least 20 amino acids, at least 40 amino acids, at least 60 amino acids, at least 80 amino acids, at least 100 amino acids, at least 120 amino acids, at least 140 amino acids, at least 160 amino acids, at least 180 amino acids, at least 200 amino acids, at least 220 amino acids, at least 240 amino acids, at least 260 amino acids, at least 300 amino acids, or at least 350 amino acids may be truncated at the N-terminus of the Cas7-11 effector. For example, at least 300 amino acids may be truncated at the C-terminus of the Cas7-11 effector, and at least 20 amino acids, at least 40 amino acids, at least 60 amino acids, at least 80 amino acids, at least 100 amino acids, at least 120 amino acids, at least 140 amino acids, at least 160 amino acids, at least 180 amino acids, at least 200 amino acids, at least 220 amino acids, at least 240 amino acids, at least 260 amino acids, at least 300 amino acids, or at least 350 amino acids may be truncated at the N-terminus of the Cas7-11 effector. For example, at least 350 amino acids may be truncated at the C-terminus of the Cas7-11 effector, and at least 20 amino acids, at least 40 amino acids, at least 60 amino acids, at least 80 amino acids, at least 100 amino acids, at least 120 amino acids, at least 140 amino acids, at least 160 amino acids, at least 180 amino acids, at least 200 amino acids, at least 220 amino acids, at least 240 amino acids, at least 260 amino acids, at least 300 amino acids, or at least 350 amino acids may be truncated at the N-terminus of the Cas7-11 effector. For example, at least 20 amino acids may be truncated at the N-terminus of the Cas7-11 effector, and at least 20 amino acids, at least 40 amino acids, at least 60 amino acids, at least 80 amino acids, at least 100 amino acids, at least 120 amino acids, at least 140 amino acids, at least 160 amino acids, at least 180 amino acids, at least 200 amino acids, at least 220 amino acids, at least 240 amino acids, at least 260 amino acids, at least 300 amino acids, or at least 350 amino acids may be truncated at the C-terminus of the Cas7-11 effector. For example, at least 40 amino acids may be truncated at the N-terminus of the Cas7-11 effector, and at least 20 amino acids, at least 40 amino acids, at least 60 amino acids, at least 80 amino acids, at least 100 amino acids, at least 120 amino acids, at least 140 amino acids, at least 160 amino acids, at least 180 amino acids, at least 200 amino acids, at least 220 amino acids, at least 240 amino acids, at least 260 amino acids, at least 300 amino acids, or at least 350 amino acids may be truncated at the C-terminus of the Cas7-11 effector. For example, at least 60 amino acids may be truncated at the N-terminus of the Cas7-11 effector, and at least 20 amino acids, at least 40 amino acids, at least 60 amino acids, at least 80 amino acids, at least 100 amino acids, at least 120 amino acids, at least 140 amino acids, at least 160 amino acids, at least 180 amino acids, at least 200 amino acids, at least 220 amino acids, at least 240 amino acids, at least 260 amino acids, at least 300 amino acids, or at least 350 amino acids may be truncated at the C-terminus of the Cas7-11 effector. For example, at least 80 amino acids may be truncated at the N-terminus of the Cas7-11 effector, and at least 20 amino acids, at least 40 amino acids, at least 60 amino acids, at least 80 amino acids, at least 100 amino acids, at least 120 amino acids, at least 140 amino acids, at least 160 amino acids, at least 180 amino acids, at least 200 amino acids, at least 220 amino acids, at least 240 amino acids, at least 260 amino acids, at least 300 amino acids, or at least 350 amino acids may be truncated at the C-terminus of the Cas7-11 effector. For example, at least 100 amino acids may be truncated at the N-terminus of the Cas7-11 effector, and at least 20 amino acids, at least 40 amino acids, at least 60 amino acids, at least 80 amino acids, at least 100 amino acids, at least 120 amino acids, at least 140 amino acids, at least 160 amino acids, at least 180 amino acids, at least 200 amino acids, at least 220 amino acids, at least 240 amino acids, at least 260 amino acids, at least 300 amino acids, or at least 350 amino acids may be truncated at the C-terminus of the Cas7-11 effector. For example, at least 120 amino acids may be truncated at the N-terminus of the Cas7-11 effector, and at least 20 amino acids, at least 40 amino acids, at least 60 amino acids, at least 80 amino acids, at least 100 amino acids, at least 120 amino acids, at least 140 amino acids, at least 160 amino acids, at least 180 amino acids, at least 200 amino acids, at least 220 amino acids, at least 240 amino acids, at least 260 amino acids, at least 300 amino acids, or at least 350 amino acids may be truncated at the C-terminus of the Cas7-11 effector. For example, at least 140 amino acids may be truncated at the N-terminus of the Cas7-11 effector, and at least 20 amino acids, at least 40 amino acids, at least 60 amino acids, at least 80 amino acids, at least 100 amino acids, at least 120 amino acids, at least 140 amino acids, at least 160 amino acids, at least 180 amino acids, at least 200 amino acids, at least 220 amino acids, at least 240 amino acids, at least 260 amino acids, at least 300 amino acids, or at least 350 amino acids may be truncated at the C-terminus of the Cas7-11 effector. For example, at least 160 amino acids may be truncated at the N-terminus of the Cas7-11 effector, and at least 20 amino acids, at least 40 amino acids, at least 60 amino acids, at least 80 amino acids, at least 100 amino acids, at least 120 amino acids, at least 140 amino acids, at least 160 amino acids, at least 180 amino acids, at least 200 amino acids, at least 220 amino acids, at least 240 amino acids, at least 260 amino acids, at least 300 amino acids, or at least 350 amino acids may be truncated at the C-terminus of the Cas7-11 effector. For example, at least 180 amino acids may be truncated at the N-terminus of the Cas7-11 effector, and at least 20 amino acids, at least 40 amino acids, at least 60 amino acids, at least 80 amino acids, at least 100 amino acids, at least 120 amino acids, at least 140 amino acids, at least 160 amino acids, at least 180 amino acids, at least 200 amino acids, at least 220 amino acids, at least 240 amino acids, at least 260 amino acids, at least 300 amino acids, or at least 350 amino acids may be truncated at the C-terminus of the Cas7-11 effector. For example, at least 200 amino acids may be truncated at the N-terminus of the Cas7-11 effector, and at least 20 amino acids, at least 40 amino acids, at least 60 amino acids, at least 80 amino acids, at least 100 amino acids, at least 120 amino acids, at least 140 amino acids, at least 160 amino acids, at least 180 amino acids, at least 200 amino acids, at least 220 amino acids, at least 240 amino acids, at least 260 amino acids, at least 300 amino acids, or at least 350 amino acids may be truncated at the C-terminus of the Cas7-11 effector. For example, at least 220 amino acids may be truncated at the N-terminus of the Cas7-11 effector, and at least 20 amino acids, at least 40 amino acids, at least 60 amino acids, at least 80 amino acids, at least 100 amino acids, at least 120 amino acids, at least 140 amino acids, at least 160 amino acids, at least 180 amino acids, at least 200 amino acids, at least 220 amino acids, at least 240 amino acids, at least 260 amino acids, at least 300 amino acids, or at least 350 amino acids may be truncated at the C-terminus of the Cas7-11 effector. For example, at least 240 amino acids may be truncated at the N-terminus of the Cas7-11 effector, and at least 20 amino acids, at least 40 amino acids, at least 60 amino acids, at least 80 amino acids, at least 100 amino acids, at least 120 amino acids, at least 140 amino acids, at least 160 amino acids, at least 180 amino acids, at least 200 amino acids, at least 220 amino acids, at least 240 amino acids, at least 260 amino acids, at least 300 amino acids, or at least 350 amino acids may be truncated at the C-terminus of the Cas7-11 effector. For example, at least 260 amino acids may be truncated at the N-terminus of the Cas7-11 effector, and at least 20 amino acids, at least 40 amino acids, at least 60 amino acids, at least 80 amino acids, at least 100 amino acids, at least 120 amino acids, at least 140 amino acids, at least 160 amino acids, at least 180 amino acids, at least 200 amino acids, at least 220 amino acids, at least 240 amino acids, at least 260 amino acids, at least 300 amino acids, or at least 350 amino acids may be truncated at the C-terminus of the Cas7-11 effector. For example, at least 280 amino acids may be truncated at the N-terminus of the Cas7-11 effector, and at least 20 amino acids, at least 40 amino acids, at least 60 amino acids, at least 80 amino acids, at least 100 amino acids, at least 120 amino acids, at least 140 amino acids, at least 160 amino acids, at least 180 amino acids, at least 200 amino acids, at least 220 amino acids, at least 240 amino acids, at least 260 amino acids, at least 300 amino acids, or at least 350 amino acids may be truncated at the C-terminus of the Cas7-11 effector. For example, at least 300 amino acids may be truncated at the N-terminus of the Cas7-11 effector, and at least 20 amino acids, at least 40 amino acids, at least 60 amino acids, at least 80 amino acids, at least 100 amino acids, at least 120 amino acids, at least 140 amino acids, at least 160 amino acids, at least 180 amino acids, at least 200 amino acids, at least 220 amino acids, at least 240 amino acids, at least 260 amino acids, at least 300 amino acids, or at least 350 amino acids may be truncated at the C-terminus of the Cas7-11 effector. For example, at least 350 amino acids may be truncated at the N-terminus of the Cas7-11 effector, and at least 20 amino acids, at least 40 amino acids, at least 60 amino acids, at least 80 amino acids, at least 100 amino acids, at least 120 amino acids, at least 140 amino acids, at least 160 amino acids, at least 180 amino acids, at least 200 amino acids, at least 220 amino acids, at least 240 amino acids, at least 260 amino acids, at least 300 amino acids, or at least 350 amino acids may be truncated at the C-terminus of the Cas7-11 effector.

[0156] In some embodiments, the Cas7-11 effector comprises a deletion of the INS domain. For example, at least 1 amino acid, at least 2 amino acids, at least 3 amino acids, at least 4 amino acids, at least 5 amino acids, at least 6 amino acids, at least 7 amino acids, at least 8 amino acids, at least 9 amino acids, at least 10 amino acids, at least 15 amino acids, at least 20 amino acids, at least 40 amino acids, at least 50 amino acids, at least 60 amino acids, at least 80 amino acids, at least 100 amino acids, at least 120 amino acids, at least 140 amino acids, at least 150 amino acids, at least 160 amino acids, at least 180 amino acids, at least 200 amino acids, at least 220 amino acids, at least 240 amino acids, at least 250 amino acids, at least 260 amino acids, at least 300 amino acids, at least 350 amino acids, or any ranges that are made of any two or more points in the above list of the INS domain may be deleted.

[0157] In some embodiments, the INS domain of the Cas7-11 effector is replaced by a linker. See, e.g., Reddy Chichili, V. P., Kumar, V., & Sivaraman, J., “Linkers in the structural biology of protein-protein interactions,” Protein science: a publication of the Protein Society, 22(2), 153-167 (2013); https://doi.org/10.1002/pro.2206, incorporated herewith in its entirety by reference. For example, the INS domain of the Cas7-11 effector may be replaced by a GG, GGG, GS, GGS, GGGS (SEQ ID NO: 172), and/or GGGGS linker (SEQ ID NO: 173). For example, the INS domain of the Cas7-11 effector may be replaced by a (GG)x (SEQ ID NO: 174), (GGG)x (SEQ ID NO: 175), (GGS)x (SEQ ID NO: 176), (GGGS)x (SEQ ID NO: 177), and/or a (GGGGS)x linker (SEQ ID NO: 178), wherein x is independently 1, 2, 3, 4, 5, 6, 7, 8, 9, 10, 11, or 12. For example, the INS domain of the Cas7-11 effector may be replaced by a linker with at least 1 amino acid, at least 2 amino acids, at least 3 amino acids, at least 4 amino acids, at least 5 amino acids, at least 6 amino acids, at least 7 amino acids, at least 8 amino acids, at least 9 amino acids, at least 10 amino acids, at least 11 amino acids, at least 12 amino acids, at least 13 amino acids, at least 14 amino acids, at least 15 amino acids, at least 16 amino acids, at least 17 amino acids, at least 18 amino acids, at least 19 amino acids, at least 20 amino acids, or any ranges that are made of any two or more points in the above list.

[0158] The additional modifications of the CRISPR-Cas protein may or may not cause an altered functionality. By means of example, and in particular with reference to CRISPR-Cas protein, modifications which do not result in an altered functionality include for instance codon optimization for expression into a particular host, or providing the nuclease with a particular marker (e.g., for visualization). Modifications with may result in altered functionality may also include mutations, including point mutations, insertions, deletions, truncations (including split nucleases), etc. Fusion proteins may without limitation include for instance fusions with heterologous domains or functional domains (e.g., localization signals, catalytic domains, etc.). In certain embodiments, various modifications may be combined (e.g., a mutated nuclease which is catalytically inactive, and which further is fused to a functional domain, such as for instance to induce DNA methylation or another nucleic acid modification, such as including without limitation a break (e.g., by a different nuclease (domain)), a mutation, a deletion, an insertion, a replacement, a ligation, a digestion, a break or a recombination). As used herein, “altered functionality” includes without limitation an altered specificity (e.g., altered target recognition, increased (e.g., “enhanced” Cas proteins) or decreased specificity, or altered PAM recognition), altered activity (e.g., increased or decreased catalytic activity, including catalytically inactive nucleases or nickases), and/or altered stability (e.g., fusions with destabilization domains). Suitable heterologous domains include without limitation a nuclease, a ligase, a repair protein, a methyltransferase, (viral) integrase, a recombinase, a transposase, an argonaute, a cytidine deaminase, a retron, a group II intron, a phosphatase, a phosphorylase, a sulpfurylase, a kinase, a polymerase, an exonuclease, etc. Examples of all these modifications are known in the art. It will be understood that a “modified” nuclease as referred to herein, and in particular a “modified” Cas or “modified” CRISPR-Cas system or complex preferably still has the capacity to interact with or bind to the poly-nucleic acid (e.g., in complex with the guide molecule). Such modified Cas protein can be combined with the deaminase protein or active domain thereof as described herein.

[0159] In certain embodiments, CRISPR-Cas protein may comprise one or more modifications resulting in enhanced activity and/or specificity, such as including mutating residues that stabilize the targeted or non-targeted strand (e.g., eCas9; “Rationally engineered Cas9 nucleases with improved specificity”, Slaymaker et al. (2016), Science, 351(6268):84-88, incorporated herewith in its entirety by reference). In certain embodiments, the altered or modified activity of the engineered CRISPR protein comprises increased targeting efficiency or decreased off-target binding. In certain embodiments, the altered activity of the engineered CRISPR protein comprises modified cleavage activity. In certain embodiments, the altered activity comprises increased cleavage activity as to the target polynucleotide loci. In certain embodiments, the altered activity comprises decreased cleavage activity as to the target polynucleotide loci. In certain embodiments, the altered activity comprises decreased cleavage activity as to off-target polynucleotide loci. In certain embodiments, the altered or modified activity of the modified nuclease comprises altered helicase kinetics. In certain embodiments, the modified nuclease comprises a modification that alters association of the protein with the nucleic acid molecule comprising RNA (in the case of a Cas protein), or a strand of the target polynucleotide loci, or a strand of off-target polynucleotide loci. In an aspect of the disclosure, the engineered CRISPR protein comprises a modification that alters formation of the CRISPR complex. In certain embodiments, the altered activity comprises increased cleavage activity as to off-target polynucleotide loci. Accordingly, in certain embodiments, there is increased specificity for target polynucleotide loci as compared to off-target polynucleotide loci. In other embodiments, there is reduced specificity for target polynucleotide loci as compared to off-target polynucleotide loci. In certain embodiments, the mutations result in decreased off-target effects (e.g., cleavage or binding properties, activity, or kinetics), such as in case for Cas proteins for instance resulting in a lower tolerance for mismatches between target and guide RNA. Other mutations may lead to increased off-target effects (e.g., cleavage or binding properties, activity, or kinetics). Other mutations may lead to increased or decreased on-target effects (e.g., cleavage or binding properties, activity, or kinetics). In certain embodiments, the mutations result in altered (e.g., increased or decreased) helicase activity, association, or formation of the functional nuclease complex (e.g., CRISPR-Cas complex). In certain embodiments, as described above, the mutations result in an altered PAM recognition, i.e., a different PAM may be (in addition or in the alternative) be recognized, compared to the unmodified Cas protein. Particularly preferred mutations include positively charged residues and/or (evolutionary) conserved residues, such as conserved positively charged residues, in order to enhance specificity. In certain embodiments, such residues may be mutated to uncharged residues, such as alanine.

[0160] Type-III CRISPR-Cas Proteins

[0161] The application describes methods using Type-III CRISPR-Cas proteins. This is exemplified herein with Cas7-11, whereby a number of orthologs or homologs have been identified. It will be apparent to the skilled person that further orthologs or homologs can be identified and that any of the functionalities described herein may be engineered into other orthologs, including chimeric enzymes comprising fragments from multiple orthologs.

[0162] Computational methods of identifying novel CRISPR-Cas loci are described in EP3009511 or US2016208243 and may comprise the following steps: detecting all contigs encoding the Cas1 protein; identifying all predicted protein coding genes within 20 kB of the cas1 gene; comparing the identified genes with Cas protein-specific profiles and predicting CRISPR arrays; selecting unclassified candidate CRISPR-Cas loci containing proteins larger than 500 amino acids (>500 aa); analyzing selected candidates using methods such as PSI-BLAST and HH11Pred to screen for known protein domains, thereby identifying novel Class 2 CRISPR-Cas loci (see also Schmakov et al. 2015, Mol Cell. 60(3):385-97). In addition to the above-mentioned steps, additional analysis of the candidates may be conducted by searching metagenomics databases for additional homologs. Additionally, or alternatively, to expand the search to non-autonomous CRISPR-Cas systems, the same procedure can be performed with the CRISPR array used as the seed.

[0163] In one aspect the detecting all contigs encoding the Cas1 protein is performed by GenemarkS, a gene prediction program as further described in “GeneMarkS: a self-training method for prediction of gene starts in microbial genomes. Implications for finding sequence motifs in regulatory regions.” John Besemer, Alexandre Lomsadze and Mark Borodovsky, Nucleic Acids Research (2001) 29, pp 2607-2618, herein incorporated by reference.

[0164] In one aspect the identifying all predicted protein coding genes is carried out by comparing the identified genes with Cas protein-specific profiles and annotating them according to NCBI Conserved Domain Database (CDD) which is a protein annotation resource that consists of a collection of well-annotated multiple sequence alignment models for ancient domains and full-length proteins. These are available as position-specific score matrices (PSSMs) for fast identification of conserved domains in protein sequences via RPS-BLAST. CDD content includes NCBI-curated domains, which use 3D-structure information to explicitly define domain boundaries and provide insights into sequence/structure/function relationships, as well as domain models imported from a number of external source databases (Pfam, SMART, COG, PRK, TIGRFAM). In a further aspect, CRISPR arrays were predicted using a PILER-CR program which is a public domain software for finding CRISPR repeats as described in “PILER-CR: fast and accurate identification of CRISPR repeats,” Edgar, R. C., BMC Bioinformatics, January 20; 8:18(2007), herein incorporated by reference.

[0165] In a further aspect, the case-by-case analysis is performed using PSI-BLAST (Position-Specific Iterative Basic Local Alignment Search Tool). PSI-BLAST derives a position-specific scoring matrix (PSSM) or profile from the multiple sequence alignment of sequences detected above a given score threshold using protein-protein BLAST. This PSSM is used to further search the database for new matches and updated for subsequent iterations with these newly detected sequences. Thus, PSI-BLAST provides a means of detecting distant relationships between proteins.

[0166] In another aspect, the case-by-case analysis is performed using HHpred, a method for sequence database searching and structure prediction that is as easy to use as BLAST or PSI-BLAST and that is at the same time much more sensitive in finding remote homologs. In fact, HHpred's sensitivity is competitive with the most powerful servers for structure prediction currently available. HHpred is the first server that is based on the pairwise comparison of profile hidden Markov models (HMMs). Whereas most conventional sequence search methods search sequence databases such as UniProt or the NR, HHpred searches alignment databases, like Pfam or SMART. This greatly simplifies the list of hits to a number of sequence families instead of a clutter of single sequences. All major publicly available profile and alignment databases are available through HHpred. HHpred accepts a single query sequence or a multiple alignment as input. Within only a few minutes it returns the search results in an easy-to-read format similar to that of PSI-BLAST. Search options include local or global alignment and scoring secondary structure similarity. HHpred can produce pairwise query-template sequence alignments, merged query-template multiple alignments (e.g., for transitive searches), as well as 3D structural models calculated by the MODELLER software from HHpred alignments.

[0167] Deactivated/Inactivated Cas7-11 Proteins

[0168] Where the Cas7-11 protein has nuclease activity, the Cas7-11 protein may be modified to have diminished nuclease activity e.g., nuclease inactivation of at least 70%, at least 80%, at least 90%, at least 95%, at least 97%, or 100% as compared with the wild type enzyme; or to put in another way, a Cas7-11 enzyme having advantageously about 0% of the nuclease activity of the non-mutated or wild type Cas7-11 enzyme or CRISPR-Cas protein, or no more than about 3% or about 5% or about 10% of the nuclease activity of the non-mutated or wild type Cas7-11 enzyme.

[0169] Modified Cas7-11 Enzymes

[0170] In particular embodiments, it is of interest to make use of an engineered Cas7-11 protein as defined herein, such as Cas7-11, wherein the protein complexes with a nucleic acid molecule comprising RNA to form a CRISPR complex, wherein when in the CRISPR complex, the nucleic acid molecule targets one or more target polynucleotide loci, the protein comprises at least one modification compared to unmodified Cas7-11 protein, and wherein the CRISPR complex comprising the modified protein has altered activity as compared to the complex comprising the unmodified Cas7-11 protein. It is to be understood that when referring herein to CRISPR “protein,” the Cas7-11 protein is an unmodified or modified CRISPR-Cas protein (e.g., having increased or decreased or the same (or no) enzymatic activity, such as without limitation including Cas7-11. The term “CRISPR protein” may be used interchangeably with “CRISPR-Cas protein”, irrespective of whether the CRISPR protein has altered, such as increased or decreased (or no) enzymatic activity, compared to the wild type CRISPR protein.

[0171] Computational analysis of the primary structure of Cas7-11 nucleases reveals 5 distinct domain regions.

[0172] Based on the above information, mutants can be generated which lead to inactivation of the enzyme or which modify the double strand nuclease to nickase activity. In alternative embodiments, this information is used to develop enzymes with reduced off-target effects.

[0173] In certain of the above-described Cas7-11 enzymes, the enzyme is modified by mutation of one or more residues (in the Cas7-like domains as well as the small subunit).

[0174] Orthologs of Cas7-11

[0175] The terms “orthologue” (also referred to as “ortholog” herein) and “homologue” (also referred to as “homolog” herein) are well known in the art. By means of further guidance, a “homologue” of a protein as used herein is a protein of the same species which performs the same or a similar function as the protein it is a homologue of Homologous proteins may but need not be structurally related or are only partially structurally related. An “orthologue” of a protein as used herein is a protein of a different species which performs the same or a similar function as the protein it is an orthologue of Orthologous proteins may but need not be structurally related or are only partially structurally related. Homologs and orthologs may be identified by homology modelling (see, e.g., Greer, Science vol. 228 (1985) 1055, and Blundell et al. Eur J Biochem vol 172 (1988), 513) or “structural BLAST” (Dey F, Cliff Zhang Q, Petrey D, Honig B. Toward a “structural BLAST”: using structural relationships to infer function. Protein Sci. 2013 April; 22(4):359-66. doi: 10.1002/pro.2225.). See also Shmakov et al. (2015) for application in the field of CRISPR-Cas loci.

[0176] The present disclosure encompasses the use of a Cas7-11 effector protein, derived from a Cas7-11 locus denoted as subtype III-E. Herein such effector proteins are also referred to as “Cas7-1 ip”, e.g., a Cas7-11 protein (and such effector protein or Cas7-11 protein or protein derived from a Cas7-11 locus is also called “CRISPR-Cas protein”).

[0177] In particular embodiments, the effector protein is a Cas7-11 effector protein from an organism from a genus comprising Candidatus Jettenia caeni, Candidatus Scalindua brodae, Desulfobacteraceae, Candidatus Magnetomorum, Desulfonema Ishimotonii, Candidatus Brocadia, Deltaproteobacteria, Syntrophorhabdaceae, or Nitrospirae.

[0178] Delivery Cas7-11 Effector

[0179] In some embodiments, the Cas7-11 effector and/or peptide sequence are introduced into a cell as a nucleic acid encoding each protein. The nucleic acid introduced into the eukaryotic cell is a plasmid DNA or viral vector. In some embodiments, the Cas7-11 effector and/or peptide sequence are introduced into a cell via a ribonucleoprotein (RNP).

[0180] Preferably, delivery is in the form of a vector which may be a viral vector, such as a lenti- or baculo- or adeno-viral/adeno-associated viral vectors, but other means of delivery are known (such as yeast systems, microvesicles, gene guns/means of attaching vectors to gold nanoparticles) and are provided. The viral vector may be selected from a variety of families/genera of viruses, including, but not limited to Myoviridae, Siphoviridae, Podoviridae, Corticoviridae, Lipothrixviridae, Poxviridae, Iridoviridae, Adenoviridae, Polyomaviridae, Papillomaviridae, Mimiviridae, Pandoravirusa, Salterprovirusa, Inoviridae, Microviridae, Parvoviridae, Circoviridae, Hepadnaviridae, Caulimoviridae, Retroviridae, Cystoviridae, Reoviridae, Birnaviridae, Totiviridae, Partitiviridae, Filoviridae, Orthomyxoviridae, Deltavirusa, Leviviridae, Picornaviridae, Marnaviridae, Secoviridae, Potyviridae, Caliciviridae, Hepeviridae, Astroviridae, Nodaviridae, Tetraviridae, Luteoviridae, Tombusviridae, Coronaviridae, Arteriviridae, Flaviviridae, Togaviridae, Virgaviridae, Bromoviridae, Tymoviridae, Alphaflexiviridae, Sobemovirusa, Idaeovirusa, and Herpesviridae.

[0181] A vector may mean not only a viral or yeast system (for instance, where the nucleic acids of interest may be operably linked to and under the control of (in terms of expression, such as to ultimately provide a processed RNA) a promoter), but also direct delivery of nucleic acids into a host cell. For example, baculoviruses may be used for expression in insect cells. These insect cells may, in turn be useful for producing large quantities of further vectors, such as AAV or lentivirus adapted for delivery of the present disclosure. Also envisaged is a method of delivering the Cas7-11 effector and/or peptide sequence comprising delivering to a cell mRNAs encoding each.

[0182] In some embodiments, expression of a nucleic acid sequence encoding the Cas7-11 effector and/or peptide sequence may be driven by a promoter. In some embodiments, a single promoter drives expression of a nucleic acid sequence encoding the Cas7-11 effector. In some embodiments, the Cas7-11 effector and guide sequence(s) are operably linked to and expressed from the same promoter. In some embodiments, the Cas7-11 and guide sequence(s) are expressed from different promoters. For example, the promoter(s) can be, but are not limited to, a UBC promoter, a PGK promoter, an EF1A promoter, a CMV promoter, an EFS promoter, a SV40 promoter, and a TRE promoter. The promoter may be a weak or a strong promoter. The promoter may be a constitutive promoter or an inducible promoter. In some embodiments, the promoter can also be an AAV ITR, and can be advantageous for eliminating the need for an additional promoter element, which can take up space in the vector. The additional space freed up by use of an AAV ITR can be used to drive the expression of additional elements, such as guide sequences. In some embodiments, the promoter may be a tissue specific promoter.

[0183] In some embodiments, an enzyme coding sequence encoding Cas7-11 effector and/or peptide sequence is codon-optimized for expression in particular cells, such as eukaryotic cells. The eukaryotic cells may be those of or derived from a particular organism, such as a mammal, including but not limited to human, mouse, rat, rabbit, dog, or non-human primate. In general, codon optimization refers to a process of modifying a nucleic acid sequence for enhanced expression in the host cells of interest by replacing at least one codon (e.g., about or more than about 1, 2, 3, 4, 5, 10, 15, 20, 25, 50, or more codons) of the native sequence with codons that are more frequently or most frequently used in the genes of that host cell while maintaining the native amino acid sequence. Various species exhibit particular bias for certain codons of a particular amino acid. Codon bias (differences in codon usage between organisms) often correlates with the efficiency of translation of messenger RNA (mRNA), which is in turn believed to be dependent on, among other things, the properties of the codons being translated and the availability of particular transfer RNA (tRNA) molecules. The predominance of selected tRNAs in a cell is generally a reflection of the codons used most frequently in peptide synthesis. Accordingly, genes can be tailored for optimal gene expression in a given organism based on codon optimization. Codon usage tables are readily available, for example, at the “Codon Usage Database”, and these tables can be adapted in a number of ways. See Nakamura, Y., et al. “codon usage tabulated from the international DNA sequence databases: status for the year 2000” Nucl. Acids Res. 28:292 (2000). Computer algorithms for codon optimizing a particular sequence for expression in a particular host cell are also available, such as Gene Forge (Aptagen; Jacobus, Pa.), are also available. In some embodiments, one or more codons (e.g., 1, 2, 3, 4, 5, 10, 15, 20, 25, 50, or more, or all codons) in a sequence encoding a Cas7-11 effector correspond to the most frequently used codon for a particular amino acid.

[0184] In some embodiments, a vector encodes a Cas7-11 effector and/or peptide sequence comprising one or more nuclear localization sequences (NLSs), such as about or more than about 1, 2, 3, 4, 5, 6, 7, 8, 9, 10, or more NLSs. In some embodiments, the Cas7-11 protein comprises about or more than 1, 2, 3, 4, 5, 6, 7, 8, 9, 10, or more NLSs at or near the amino-terminus, about or more than about 1, 2, 3, 4, 5, 6, 7, 8, 9, 10, or more NLSs at or near the carboxy-terminus, or a combination of these (e.g., one or more NLS at the amino-terminus and one or more NLS at the carboxy terminus). When more than one NLS is present, each may be selected independently of the others, such that a single NLS may be present in more than one copy and/or in combination with one or more other NLSs present in one or more copies. In some embodiments, an NLS is considered near the N- or C-terminus when the nearest amino acid of the NLS is within about 1, 2, 3, 4, 5, 10, 15, 20, 25, 30, 40, 50, or more amino acids along the polypeptide chain from the N- or C-terminus. Typically, an NLS consists of one or more short sequences of positively charged lysines or arginines exposed on the protein surface, bur other types of NLS are known. In some embodiments, the NLS is between two domains, for example between the Cas7-11 effector protein and the viral protein. The NLS may also be between two functional domains separated or flanked by a glycine-serine linker.

[0185] In general, the one or more NLSs are of sufficient strength to drive accumulation of the Cas7-11 effector and/or peptide sequence in a detectable amount in the nucleus of a eukaryotic cell. In general, strength of nuclear localization activity may derive from the number of NLSs in the Cas7-11 effector and/or other peptide sequences, the particular NLS used, or a combination of these factors. Detection of accumulation in the nucleus may be performed by any suitable technique. For example, a detectable marker may be fused to the Cas7-11 effector and/or peptide sequence, such that location within a cell may be visualized, such as in combination with a means for detecting the location of the nucleus (e.g., a stain specific for the nucleus such as DAPI). Examples of detectable markers include fluorescent proteins (such as green fluorescent proteins, or GFP; RFP; CFP), and epitope tags (HA tag, FLAG tag, SNAP tag). Cell nuclei may also be isolated from cells, the contents of which may then be analyzed by any suitable process for detecting protein, such as immunohistochemistry, Western blot, or enzyme activity assay. Accumulation in the nucleus may also be determined indirectly.

[0186] In some aspects, the disclosure provides methods comprising delivering one or more polynucleotides, such as one or more vectors as described herein, one or more transcripts thereof, and/or one or proteins transcribed therefrom, to a host cell. In some aspects, the disclosure further provides cells produced by such methods, and organisms (such as animals, plants, or fungi) comprising or produced from such cells. In some embodiments, a Cas protein in combination with (and optionally complexed) with a guide sequence is delivered to a cell. Conventional viral and non-viral based gene transfer methods can be used to introduce nucleic acids in mammalian cells or target tissues. Such methods can be used to administer nucleic acids encoding a Cas7-11 effector and/or a polypeptide to cells in culture, or in a host organism. Non-viral vector delivery systems include DNA plasmids, RNA (e.g., a transcript of a vector described herein), naked nucleic acid, nucleic acid complexed with a delivery vehicle, such as a liposome, and ribonucleoprotein. Viral vector delivery systems include DNA and RNA viruses, which have either episomal or integrated genomes after delivery to the cell. For a review of gene therapy procedures, see Anderson, Science 256:808-8313 (1992); Navel and Felgner, TIBTECH 11:211-217 (1993); Mitani and Caskey, TIBTECH 11:162-166 (1993); Dillon, TIBTECH 11:167-175 (1993); Miller, Nature 357:455-460 (1992); Van Brunt, Biotechnology 6(10):1149-1154 (1988); Vigne, Restorative Neurology and Neuroscience 8:35-36 (1995); Kremer and Perricaudet, British Medical Bulletin 51(1):31-44 (1995); Haddada et al., in Current Topics in Microbiology and Immunology, Doerfler and Bohm (eds) (1995); and Yu et al., Gene Therapy 1:13-26 (1994), which are incorporated herein by reference in their entirety.

[0187] The Cas7-11 effector and/or peptide sequence can be delivered using adeno-associated virus (AAV), lentivirus, adenovirus, or other viral vector types, or combinations thereof. In some embodiments, one or more Cas7-11 effectors and/or one or more guide RNAs can be packaged into one or more viral vectors. In some embodiments, the Cas7-11 effector and/or peptide sequence can be delivered via AAV as a trans-splicing system, similar to Lai et al. (Nature Biotechnology, 2005, DOI: 10.1038/nbt1153). In some embodiments, the viral vector is delivered to the tissue of interest by, for example, an intramuscular injection, while other times the viral delivery is via intravenous, transdermal, intranasal, oral, mucosal, intrathecal, intracranial or other delivery methods. Such delivery may be either via a single dose, or multiple doses. One skilled in the art understands that the actual dosage to be delivered herein may vary greatly depending upon a variety of factors, such as the vector chosen, the target cell, organism, or tissue, the general condition of the subject to be treated, the degree of transformation/modification sought, the administration route, the administration mode, the type of transformation/modification sought, etc.

[0188] The use of RNA or DNA viral based systems for the delivery of nucleic acids takes advantage of highly evolved processes for targeting a virus to specific cells in the body and trafficking the viral payload to the nucleus. Viral vectors can be administered directly to patients (in vivo) or they can be used to treat cells in vitro, and the modified cells may optionally be administered to patients (e.g., vivo). Conventional viral based systems could include retroviral, lentivirus, adenoviral, adeno-associated and herpes simplex virus vectors for gene transfer. Integration in the host genome is possible with the retrovirus, lentivirus, and adeno-associated virus gene transfer methods, often resulting in long term expression of the inserted transgene. Additionally, high transduction efficiencies have been observed in many different cell types and target tissues.

[0189] In certain embodiments, delivery of the Cas7-11 and/or peptide sequence to a cell is non-viral. In certain embodiments, the non-viral delivery system is selected from a ribonucleoprotein, cationic lipid vehicle, electroporation, nucleofection, calcium phosphate transfection, transfection through membrane disruption using mechanical shear forces, mechanical transfection, and nanoparticle delivery.

[0190] In some embodiments, a host cell is transiently or non-transiently transfected with one or more vectors described herein. In some embodiments, a cell is transfected as it naturally occurs in a subject. In some embodiments, a cell that is transfected is taken from a subject. In some embodiments, the cell is derived from cells taken from a subject, such as a cell line. Cell lines are available from a variety of sources known to those with skill in the art (see, e.g., the American Type Culture Collection (ATCC) (Manassas, VA). In some embodiments, a cell transfected with one or more vectors described herein is used to establish a new cell line comprising one or more vector-derived sequences.

[0191] Guide Molecules

[0192] The system may comprise a guide molecule. The guide molecule may comprise a guide sequence. In certain cases, the guide sequence may be linked to a direct repeat sequence. In some cases, the system may comprise a nucleotide sequence encoding the guide molecule. The guide molecule may form a complex with the dead Cas7-11 protein and directs the complex to bind the target RNA sequence at one or more codons encoding an amino acid that is post-translationally modified. The guide sequence may be capable of hybridizing with a target RNA sequence comprising an Adenine or Cytidine encoding said amino acid to form an RNA duplex, wherein said guide sequence comprises a non-pairing nucleotide at a position corresponding to said Adenine or Cytidine resulting in a mismatch in the RNA duplex formed. The guide sequence may comprise one or more mismatch corresponding to different adenosine sites in the target sequence. In certain cases, guide sequence may comprise multiple mismatches corresponding to different adenosine sites in the target sequence. In cases where two guide molecules are used, the guide sequence of each of the guide molecules may comprise a mismatch corresponding to a different adenosine site in the target sequence.

[0193] In general, a CRISPR system is characterized by elements that promote the formation of a CRISPR complex at the site of a target sequence. In the context of formation of a CRISPR complex, “target sequence” refers to a sequence to which a guide sequence is designed to have complementarity, where hybridization between a target DNA sequence and a guide sequence promotes the formation of a CRISPR complex.

[0194] In certain embodiments, the target sequence should be associated with a PAM (protospacer adjacent motif) or PFS (protospacer flanking sequence or site); that is, a short sequence recognized by the CRISPR complex. Depending on the nature of the CRISPR-Cas protein, the target sequence should be selected such that its complementary sequence in the DNA duplex (also referred to herein as the non-target sequence) is upstream or downstream of the PAM. The precise sequence and length requirements for the PAM differ depending on the Cas7-11 protein used, but PAMs are typically 2-8 base pair sequences adjacent the protospacer (that is, the target sequence). Examples of the natural PAM sequences for different Cas7-11 orthologues are provided herein below and the skilled person will be able to identify further PAM sequences for use with a given Cas7-11 protein. In certain embodiments, the Cas7-11 protein has been modified to recognize a non-natural PAM, such as recognizing a PAM having a sequence or comprising a sequence YCN, YCV, AYV, TYV, RYN, RCN, TGYV, NTTN, TTN, TRTN, TYTV, TYCT, TYCN, TRTN, NTTN, TACT, TYCC, TRTC, TATV, NTTV, TTV, TSTG, TVTS, TYYS, TCYS, TBYS, TCYS, TNYS, TYYS, TNTN, TSTG, TTCC, TCCC, TATC, TGTG, TCTG, TYCV, or TCTC.

[0195] The terms “guide molecule” and “guide RNA” are used interchangeably herein to refer to RNA-based molecules that are capable of forming a complex with a CRISPR-Cas protein and comprises a guide sequence having sufficient complementarity with a target nucleic acid sequence to hybridize with the target nucleic acid sequence and direct sequence-specific binding of the complex to the target nucleic acid sequence. The guide molecule or guide RNA specifically encompasses RNA-based molecules having one or more chemically modifications (e.g., by chemical linking two ribonucleotides or by replacement of one or more ribonucleotides with one or more deoxyribonucleotides), as described herein.

[0196] As used herein, the term “guide sequence” in the context of a CRISPR-Cas system, comprises any polynucleotide sequence having sufficient complementarity with a target nucleic acid sequence to hybridize with the target nucleic acid sequence and direct sequence-specific binding of a nucleic acid-targeting complex to the target nucleic acid sequence. In the context of the present disclosure the target nucleic acid sequence or target sequence is the sequence comprising the target adenosine to be deaminated also referred to herein as the “target adenosine”. In some embodiments, except for the intended dA-C mismatch, the degree of complementarity, when optimally aligned using a suitable alignment algorithm, is about or more than about 50%, 60%, 75%, 80%, 85%, 90%, 95%, 97.5%, 99%, or more. Optimal alignment may be determined with the use of any suitable algorithm for aligning sequences, non-limiting example of which include the Smith-Waterman algorithm, the Needleman-Wunsch algorithm, algorithms based on the Burrows-Wheeler Transform (e.g., the Burrows Wheeler Aligner), ClustalW, Clustal X, BLAT, Novoalign (Novocraft Technologies; available at www.novocraft.com), ELAND (Illumina, San Diego, CA), SOAP (available at soap.genomics.org.cn), and Maq (available at maq.sourceforge.net). The ability of a guide sequence (within a nucleic acid-targeting guide RNA) to direct sequence-specific binding of a nucleic acid-targeting complex to a target nucleic acid sequence may be assessed by any suitable assay. For example, the components of a nucleic acid-targeting CRISPR system sufficient to form a nucleic acid-targeting complex, including the guide sequence to be tested, may be provided to a host cell having the corresponding target nucleic acid sequence, such as by transfection with vectors encoding the components of the nucleic acid-targeting complex, followed by an assessment of preferential targeting (e.g., cleavage) within the target nucleic acid sequence, such as by Surveyor assay as described herein. Similarly, cleavage of a target nucleic acid sequence (or a sequence in the vicinity thereof) may be evaluated in a test tube by providing the target nucleic acid sequence, components of a nucleic acid-targeting complex, including the guide sequence to be tested and a control guide sequence different from the test guide sequence, and comparing binding or rate of cleavage at or in the vicinity of the target sequence between the test and control guide sequence reactions. Other assays are possible, and will occur to those skilled in the art. A guide sequence, and hence a nucleic acid-targeting guide RNA may be selected to target any target nucleic acid sequence.

[0197] In some embodiments, the guide molecule comprises a guide sequence that is designed to have at least one mismatch with the target sequence, such that an RNA duplex formed between the guide sequence and the target sequence comprises a non-pairing C in the guide sequence opposite to the target A for deamination on the target sequence. In some embodiments, aside from this A-C mismatch, the degree of complementarity, when optimally aligned using a suitable alignment algorithm, is about or more than about 50%, 60%, 75%, 80%, 85%, 90%, 95%, 97.5%, 99%, or more. In some cases, the distance between the non-pairing C and the 5′ end of the guide sequence is from about 10 to about 50, e.g., from about 10 to about 20, from about 15 to about 25, from about 20 to about 30, from about 25 to about 35, from about 30 to about 40, from about 35 to about 45, or from about 40 to about 50 nucleotides (nt) in length. In certain example. In some cases, the distance between the non-pairing C and the 3′ end of the guide sequence is from about 10 to about 50, e.g., from about 10 to about 20, from about 15 to about 25, from about 20 to about 30, from about 25 to about 35, from about 30 to about 40, from about 35 to about 45, or from about 40 to about 50 nucleotides (nt) in length. In one example, the distance between the non-pairing C and the 5′ end of said guide sequence is from about 20 to about 30 nucleotides.

[0198] In certain embodiments, the guide sequence or spacer length of the guide molecules is from 15 to 50 nt. In certain embodiments, the spacer length of the guide RNA is at least 15 nucleotides. In certain embodiments, the spacer length is from 15 to 17 nt, e.g., 15, 16, or 17 nt, from 17 to 20 nt, e.g., 17, 18, 19, or 20 nt, from 20 to 24 nt, e.g., 20, 21, 22, 23, or 24 nt, from 23 to 25 nt, e.g., 23, 24, or 25 nt, from 24 to 27 nt, e.g., 24, 25, 26, or 27 nt, from 27-30 nt, e.g., 27, 28, 29, or 30 nt, from 30-35 nt, e.g., 30, 31, 32, 33, 34, or 35 nt, or 35 nt or longer. In certain example embodiment, the guide sequence is 15, 16, 17, 18, 19, 20, 21, 22, 23, 24, 25, 26, 27, 28, 29, 30, 31, 32, 33, 34, 35, 36, 37, 38, 39 40, 41, 42, 43, 44, 45, 46, 47 48, 49, 50, 51, 52, 53, 54, 55, 56, 57, 58, 59, 60, 61, 62, 63, 64, 65, 66, 67, 68, 69, 70, 71, 72, 73, 74, 75, 76, 77, 78, 79, 80, 81, 82, 83, 84, 85, 86, 87, 88, 89, 90, 91, 92, 93, 94, 95, 96, 97, 98, 99, or 100 nt.

[0199] In some embodiments, the guide sequence has a length from about 10 to about 100, e.g., from about 20 to about 60, from about 20 to about 55, from about 20 to about 53, from about 25 to about 53, from about 29 to about 53, from about 20 to about 30, from about 25 to about 35, from about 30 to about 40, from about 35 to about 45, from about 40 to about 50, from about 45 to about 55, from about 50 to about 60, from about 55 to about 65, from about 60 to about 70, from about 70 to about 80, from about 80 to about 90, or from about 90 to about 100 nucleotides (nt) long that is capable of forming an RNA duplex with a target sequence. In certain example, the guide sequence has a length from about 20 to about 53 nt capable of forming said RNA duplex with said target sequence. In certain example, the guide sequence has a length from about 25 to about 53 nt capable of forming said RNA duplex with said target sequence. In certain example, the guide sequence has a length from about 29 to about 53 nt capable of forming said RNA duplex with said target sequence. In certain example, the guide sequence has a length from about 40 to about 50 nt capable of forming said RNA duplex with said target sequence. In some examples, the guide sequence comprises a non-pairing Cytosine at a position corresponding to said Adenine resulting in an A-C mismatch in the RNA duplex formed. The guide sequence is selected so as to ensure that it hybridizes to the target sequence comprising the adenosine to be deaminated.

[0200] In some embodiments, the guide sequence is about 10 nt to about 100 nt long and hybridizes to the target DNA strand to form an almost perfectly matched duplex, except for having a dA-C mismatch at the target adenosine site. Particularly, in some embodiments, the dA-C mismatch is located close to the center of the target sequence (and thus the center of the duplex upon hybridization of the guide sequence to the target sequence), thereby restricting the nucleotide deaminase to a narrow editing window (e.g., about 4 bp wide). In some embodiments, the target sequence may comprise more than one target adenosine to be deaminated. In further embodiments, the target sequence may further comprise one or more dA-C mismatch 3′ to the target adenosine site. In some embodiments, to avoid off-target editing at an unintended Adenine site in the target sequence, the guide sequence can be designed to comprise a non-pairing Guanine at a position corresponding to said unintended Adenine to introduce a dA-G mismatch, which is catalytically unfavorable for certain nucleotide deaminases such as ADAR1 and ADAR2. See Wong et al., RNA 7:846-858 (2001), which is incorporated herein by reference in its entirety.

[0201] In some embodiments, the sequence of the guide molecule (direct repeat and/or spacer) is selected to reduce the degree of secondary structure within the guide molecule. In some embodiments, about or less than about 75%, 50%, 40%, 30%, 25%, 20%, 15%, 10%, 5%), 1%), or fewer of the nucleotides of the nucleic acid-targeting guide RNA participate in self-complementary base pairing when optimally folded. Optimal folding may be determined by any suitable polynucleotide folding algorithm. Some programs are based on calculating the minimal Gibbs free energy. An example of one such algorithm is mFold, as described by Zuker and Stiegler (Nucleic Acids Res. 9 (1981), 133-148). Another example folding algorithm is the online webserver RNAfold, developed at Institute for Theoretical Chemistry at the University of Vienna, using the centroid structure prediction algorithm (see e.g., A. R. Gruber et al., 2008, Cell 106(1): 23-24; and PA Carr and GM Church, 2009, Nature Biotechnology 27(12): 1151-62).

[0202] In some embodiments, it is of interest to reduce the susceptibility of the guide molecule to RNA cleavage, such as to cleavage by Cas7-11. Accordingly, in particular embodiments, the guide molecule is adjusted to avoid cleavage by Cas7-11 or other RNA-cleaving enzymes.

[0203] In some embodiments, the guide molecule is modified, e.g., by one or more aptamer(s) designed to improve guide molecule delivery, including delivery across the cellular membrane, to intracellular compartments, or into the nucleus. Such a structure can include, either in addition to the one or more aptamer(s) or without such one or more aptamer(s), moiety(ies) so as to render the guide molecule deliverable, inducible or responsive to a selected effector. The disclosure accordingly comprehends a guide molecule that responds to normal or pathological physiological conditions, including without limitation pH, hypoxia, O₂ concentration, temperature, protein concentration, enzymatic concentration, lipid structure, light exposure, mechanical disruption (e.g., ultrasound waves), magnetic fields, electric fields, or electromagnetic radiation.

[0204] Trans-Splicing and Trans-Splicing Template

[0205] Generally, trans-splicing relies on the recruitment of an RNA template to a pre-mRNA without any active targeting domains and involves competition with the cis target. Combining trans-splicing with programmable RNA guided CRISPR systems can help boost the efficiency of the trans-splicing mechanism, enabling any potential type of RNA edit, insertion (e.g., correction of a mutation, a transgene), deletion, or replacement to be incorporated into endogenous transcripts. This combination can be used, for example and without limitation, to edit a polynucleotide in a cell, treat or prevent a genetically inherited diseases, and engineering cells (e.g., CAR-T cells) via editing of a transgene.

[0206] The system disclosed herein may comprise a splicing protein selected from the group consisting of RMB17, SF3B6, U2AF1, and U2AF2.

[0207] The systems disclosed herein may comprise a trans-splicing template polynucleotide. The trans-splicing template polynucleotide can comprise one or more cargo guide sequences, one or more an integration sequences, one or more a 3′ and/or 5′ splicing site sequences, one or more branch point sequences, and/or one or more polypyrimidine tract sequences. The cargo guide sequence can be complementary to a portion of one or more intron and/or exon sequences of a target RNA sequence. Each of the sequences from the trans-splicing template polynucleotide can be operably connected in any order.

[0208] The systems disclosed herein may comprise a Cas7-11 enzyme sequence coupled to one or more guide RNA sequences that is complementary to one or more portions of an intron and/or exon sequences of the target RNA sequence that is upstream, downstream, or overlapping of the portion of the intron and/or exon sequences that is complementary to a cargo guide sequence. The Cas7-11 enzyme may also be directly (no intervening linker) or indirectly (XTEN linker intervening) fused to a splicing protein at their N- or C-terminals.

[0209] The systems disclosed herein may comprise a target RNA sequence comprising one or more intron and/or exon sequences, one or more 3′ and/or 5′ splicing site sequences, and/or one or more a 5′-terminal and/or 3′-terminal fragment sequences. The one or more intron and/or exon sequences can comprise one or more branch point sequences and one or more polypyrimidine tract sequences. Each of the sequences from the target RNA sequence is operably connected in any order.

[0210] In some embodiments, the trans-splicing is a 5′ trans splicing, a 3′ trans splicing, or an internal trans splicing.

[0211] Pharmaceutical Compositions

[0212] Pharmaceutical compositions described herein comprise at least one component of an editing system described herein (e.g., an editing polypeptide) and a pharmaceutically acceptable excipient (see, e.g., Remington's Pharmaceutical Sciences (1990) Mack Publishing Co., Easton, PA, the entire contents of which is incorporated by reference herein for all purposes).

[0213] In one aspect, also provided herein are methods of making pharmaceutical compositions described herein comprising providing at least one component of an editing system described herein (e.g., an editing polypeptide) and formulating it into a pharmaceutically acceptable composition by the addition of one or more pharmaceutically acceptable excipient. In some embodiments, the pharmaceutical composition comprises a single component described herein (e.g., an editing polypeptide). In some embodiments, the pharmaceutical composition comprises a plurality of the components described herein (e.g., an editing polypeptide, a ttRNA, a targeting gRNA, etc.).

[0214] Acceptable excipients (e.g., carriers and stabilizers) are preferably nontoxic to recipients at the dosages and concentrations employed, and include buffers such as phosphate, citrate, or other organic acids; antioxidants including ascorbic acid or methionine; preservatives (such as octadecyldimethylbenzyl ammonium chloride; hexamethonium chloride; benzalkonium chloride, benzethonium chloride; phenol, butyl or benzyl alcohol; alkyl parabens such as methyl or propyl paraben; catechol; resorcinol; cyclohexanol; 3-pentanol; or m-cresol); low molecular weight (less than about 10 residues) polypeptides; proteins, such as serum albumin, gelatin, or immunoglobulins; hydrophilic polymers such as polyvinylpyrrolidone; amino acids such as glycine, glutamine, asparagine, histidine, arginine, or lysine; monosaccharides, disaccharides, or other carbohydrates including glucose, mannose, or dextrins; chelating agents such as EDTA; sugars such as sucrose, mannitol, trehalose or sorbitol; salt-forming counter-ions such as sodium; metal complexes (e.g., Zn-protein complexes); and/or non-ionic surfactants such as TWEEN™, PLURONICS™ or polyethylene glycol (PEG).

[0215] A pharmaceutical composition may be formulated for any route of administration to a subject. The skilled person knows the various possibilities to administer a pharmaceutical composition described herein in order to deliver the editing system or composition to a target cell. Non-limiting embodiments include parenteral administration, such as intramuscular, intradermal, subcutaneous, transcutaneous, or mucosal administration. In one embodiment, the pharmaceutical composition is formulated for intravenous administration. In one embodiment, the pharmaceutical composition is formulated for administration by intramuscular, intradermal, or subcutaneous injection. Injectables can be prepared in conventional forms, either as liquid solutions or suspensions. The injectables can contain one or more excipients. Exemplary excipients include, for example, water, saline, dextrose, glycerol, or ethanol. In addition, if desired, the pharmaceutical compositions to be administered can also contain minor amounts of non-toxic auxiliary substances such as wetting or emulsifying agents, pH buffering agents, stabilizers, solubility enhancers, or other such agents, such as for example, sodium acetate, sorbitan monolaurate, triethanolamine oleate or cyclodextrins. In some embodiments, the pharmaceutical composition is formulated in a single dose. In some embodiments, the pharmaceutical compositions if formulated as a multi-dose.

[0216] Pharmaceutically acceptable excipients (e.g., carriers) used in the parenteral preparations described herein include for example, aqueous vehicles, nonaqueous vehicles, antimicrobial agents, isotonic agents, buffers, antioxidants, local anesthetics, suspending and dispersing agents, emulsifying agents, sequestering or chelating agents or other pharmaceutically acceptable substances. Examples of aqueous vehicles, which can be incorporated in one or more of the formulations described herein, include sodium chloride injection, Ringer's injection, isotonic dextrose injection, sterile water injection, dextrose or lactated Ringer's injection. Nonaqueous parenteral vehicles, which can be incorporated in one or more of the formulations described herein, include fixed oils of vegetable origin, cottonseed oil, corn oil, sesame oil or peanut oil. Antimicrobial agents in bacteriostatic or fungistatic concentrations can be added to the parenteral preparations described herein and packaged in multiple-dose containers, which include phenols or cresols, mercurials, benzyl alcohol, chlorobutanol, methyl and propyl p-hydroxybenzoic acid esters, thimerosal, benzalkonium chloride or benzethonium chloride. Isotonic agents, which can be incorporated in one or more of the formulations described herein, include sodium chloride or dextrose. Buffers, which can be incorporated in one or more of the formulations described herein, include phosphate or citrate. Antioxidants, which can be incorporated in one or more of the formulations described herein, include sodium bisulfate. Local anesthetics, which can be incorporated in one or more of the formulations described herein, include procaine hydrochloride. Suspending and dispersing agents, which can be incorporated in one or more of the formulations described herein, include sodium carboxymethylcelluose, hydroxypropyl methylcellulose or polyvinylpyrrolidone. Emulsifying agents, which can be incorporated in one or more of the formulations described herein, include Polysorbate 80 (TWEEN® 80). A sequestering or chelating agent of metal ions, which can be incorporated in one or more of the formulations described herein, is EDTA. Pharmaceutical carriers, which can be incorporated in one or more of the formulations described herein, also include ethyl alcohol, polyethylene glycol or propylene glycol for water miscible vehicles; or sodium hydroxide, hydrochloric acid, citric acid or lactic acid for pH adjustment.

[0217] The precise dose to be employed in a pharmaceutical composition will also depend on the route of administration, and the seriousness of the condition caused by it, and should be decided according to the judgment of the practitioner and each subject's circumstances. For example, effective doses may also vary depending upon means of administration, target site, physiological state of the subject (including age, body weight, and health), other medications administered, or whether therapy is prophylactic or therapeutic. Therapeutic dosages are preferably titrated to optimize safety and efficacy.

[0218] Kits

[0219] Also provided herein are kits comprising at least one pharmaceutical composition described herein. In addition, the kit may comprise a liquid vehicle for solubilizing or diluting, and/or technical instructions. The technical instructions of the kit may contain information about administration and dosage and subject groups. In some embodiments, the kit contains a single container comprising a single pharmaceutical composition described herein. In some embodiments, the kit at least two separate containers, each comprising a different pharmaceutical composition described herein (e.g., a first container comprising a pharmaceutical composition comprising one component of an editing system described herein, e.g., an editing polypeptide described herein, and a second container comprising a second pharmaceutical composition comprising a second component of an editing system described herein, e.g., a ttRNA).

[0220] Methods of Use

[0221] Provided herein are various methods of using the editing systems, compositions, pharmaceutical compositions described herein and any one or more of the components thereof (e.g., an editing polypeptide).

[0222] In one aspect, provided herein are methods of editing a target polynucleotide, the method comprising contacting the target polynucleotide with an editing system, composition, pharmaceutical composition, or any component thereof (e.g., an editing polypeptide). In some embodiments, the target polynucleotide is or is within a gene. In some embodiments, the target polynucleotide is or is within a genome.

[0223] In one aspect, provided herein are methods of editing a target polynucleotide within a cell, the method comprising introducing into the cell an editing system, composition, pharmaceutical composition, or any component thereof (e.g., an editing polypeptide). In some embodiments, the target polynucleotide is or is within a gene. In some embodiments, the target polynucleotide is or is within a genome.

[0224] In one aspect, provided herein are methods of editing a target polynucleotide within a cell in a subject, the method comprising administering to the subject an editing system, composition, pharmaceutical composition, or any component thereof (e.g., an editing polypeptide), in an amount sufficient to deliver the editing system, composition, pharmaceutical composition, or component to a cell in the subject. In some embodiments, the target polynucleotide is or is within a gene. In some embodiments, the target polynucleotide is or is within a genome.

[0225] In one aspect, provided herein are methods of delivering an editing system, composition, pharmaceutical composition, or any component thereof (e.g., an editing polypeptide) to a cell comprising contacting the cell with the editing system, composition, pharmaceutical composition, or component thereof, in an amount sufficient to deliver the editing system, composition, pharmaceutical composition, or any component thereof to the cell.

[0226] In one aspect, provided herein are methods of delivering an editing system, composition, pharmaceutical composition, or any component thereof (e.g., an editing polypeptide) to a subject, the method comprising administering the editing system, composition, pharmaceutical composition, or component thereof to the subject.

[0227] In one aspect, provided herein are methods of delivering an editing system, composition, pharmaceutical composition, or any component thereof (e.g., an editing polypeptide) to a cell in a subject, the method comprising administering the editing system, composition, pharmaceutical composition, or component thereof to the subject, in an amount sufficient to deliver the editing system, composition, pharmaceutical composition, or component to a cell in the subject.

[0228] In one aspect, provided herein are methods of treating a subject diagnosed with or suspected of having a disease associated with a genetic mutation comprising administering a composition or system described herein to the subject in an amount sufficient to correct the genetic mutation. Exemplary diseases associated with a genetic mutation, include, but are not limited to cystic fibrosis, muscular dystrophy, hemochromatosis, Tay-Sachs, Huntington disease, Congenital Deafness, Sickle cell anemia, Familial hypercholesterolemia, adenosine deaminase (ADA) deficiency, X-linked SCID (X-SCID), and Wiskott-Aldrich syndrome (WAS).

[0229] In some embodiments, the genetic mutation is in one of the following genes: GBA, BTK, ADA, CNGB3, CNGA3, ATF6, GNAT2, ABCA1, ABCA7, APOE, CETP, LIPC, MMP9, PLTP, VTN, ABCA4, MFSD8, TLR3, TLR4, ERCC6, HMCN1, HTRA1, MCDR4, MCDR5, ARMS2, C2, C3, CFB, CFH, JAG1, NOTCH2, CACNAlF, SERPINA1, TTR, GSN, B2M, APOA2, APOA1, OSMR, ELP4, PAX6, ARG, ASL, PITX2, FOXC1, BBS1, BBS10, BBS2, BBS9, MKKS, MKS1, BBS4, BBS7, TTC8, ARL6, BBS5, BBS12, TRIM32, CEP290, ADIPOR1, BBIP1, CEP19, IFT27, LZTFL1, DMD, BEST1, HBB, CYP4V2, AMACR, CYP7B1, HSD3B7, AKR1D1, OPN1SW, NR2F1, RLBP1, RGS9, RGS9BP, PROM1, PRPH2, GUCY2D, CACD, CHM, ALAD, ASS1, SLC25A13, OTC, ACADVL, ETFDH, TMEM67, CC2D2A, RPGRIP1L, KCNV2, CRX, GUCA1A, CERKL, CDHR1, PDE6C, TTLL5, RPGR, CEP78, C21orf2, C80RF37, RPGRIP1, ADAM9, POC1B, PITPNM3, RAB28, CACNA2D4, AIPL1, UNC119, PDE6H, OPN1LW, RIMS1, CNNM4, IFT81, RAX2, RDH5, SEMA4A, CORD17, PDE6B, GRK1, SAG, RHO, CABP4, GNB3, SLC24A1, GNAT1, GRM6, TRPM1, LRIT3, TGFBI, TACSTD2, KRT12, OVOL2, CPS1, UGT1A1, UGT1A9, UGT1A8, UGT1A7, UGT1A6, UGT1A5, UGT1A4, CFTR, DLD, EFEMP1, ABCC2, ZNF408, LRP5, FZD4, TSPAN12, EVR3, APOB, SLC2A2, LOC106627981, GBA1, NR2E3, OAT, SLC40A1, F8, F9, UROD, CPOX, HFE, JH, LDLR, EPHX1, TJP2, BAAT, NBAS, LARS1, HAMP, HJV, RS1, ADAMTS18, LRAT, RPE65, LCA5, MERTK, GDF6, RD3, CCT2, CLUAP1, DTHD1, NMNAT1, SPATA7, IFT140, IMPDH1, OTX2, RDH12, TULP1, CRB1, MT-ND4, MT-ND1, MT-ND6, BCKDHA, BCKDHB, DBT, MMAB, ARSB, GUSB, NAGS, NPC1, NPC2, NDP, OPA1, OPA3, OPA4, OPA5, RTN4IP1, TMEM126A, OPA6, OPA8, ACO2, PAH, PRKCSH, SEC63, GAA, UROS, PPOX, HPX, HMOX1, HMBS, MIR223, CYP1B1, LTBP2, AGXT, ATP8B1, ABCB11, ABCB4, FECH, ALAS2, PRPF31, RP1, EYS, TOPORS, USH2A, CNGA1, C2ORF71, RP2, KLHL7, ORF1, RP6, RP24, RP34, ROM1, ADGRA3, AGBL5, AHR, ARHGEF18, CA4, CLCC1, DHDDS, EMC1, FAM161A, HGSNAT, HK1, IDH3B, KIAA1549, KIZ, MAK, NEUROD1, NRL, PDE6A, PDE6G, PRCD, PRPF3, PRPF4, PRPF6, PRPF8, RBP3, REEP6, SAMD11, SLC7A14, SNRNP200, SPP2, ZNF513, NEK2, NEK4, NXNL1, OFD1, RP1L1, RP22, RP29, RP32, RP63, RP9, RGR, POMGNT1, DHX38, ARL3, COL2A1, SLCO1B1, SLCO1B3, KCNJ13, TIMP3, ELOVL4, TFR2, FAH, HPD, MYO7A, CDH23, PCDH15, DFNB31, GPR98, USH1C, USH1G, CIB2, CLRN1, HARS, ABHD12, ADGRV1, ARSG, CEP250, IMPG1, IMPG2, VCAN, G6PC1, ATP7B, HTT, STAT3, PABPC1, PPIB, TOP2A, SHANK3, USF1, gLuc, and RPL41.

[0230] In some embodiments, the genetically inherited disease is selected from the group consisting of Meier-Gorlin syndrome; Seckel syndrome 4; Joubert syndrome 5; Leber congenital amaurosis 10; Charcot-Marie-Tooth disease, type 2; leukoencephalopathy; Usher syndrome, type 2C; spinocerebellar ataxia 28; glycogen storage disease type III; primary hyperoxaluria, type I; long QT syndrome 2; Sjögren-Larsson syndrome; hereditary fructosuria; neuroblastoma; amyotrophic lateral sclerosis type 9; Kallmann syndrome 1; limb-girdle muscular dystrophy, type 2L; familial adenomatous polyposis 1; familial type 3 hyperlipoproteinemia; Alzheimer's disease, type 1; metachromatic leukodystrophy; cancer; Uveitis; SCA1; SCA2; FUS-Amyotrophic Lateral Sclerosis (ALS); MAPT-Frontotemporal Dementia (FTD); Myotonic Dystrophy Type 1 (DM1); Diabetic Retinopathy (DR/DME); Oculopharyngeal Muscular Dystrophy (OPMD); SCA8; C90RF72-Amyotrophic Lateral Sclerosis (ALS); SOD1-Amyotrophic Lateral Sclerosis (ALS); Spinal Cord Injury (targets: mTOR, PTEN, KLF6/7, SOX11, KCC2, and growth factors); SCA6; SCA3 (Machado-Joseph Disease); Multiple system Atrophy (MSA); Treatment-resistant Hypertension; Myotonic Dystrophy Type 2 (DM2); Fragile X-associated Tremor Ataxia Syndrome (FXTAS); West Syndrome with ARX Mutation; Age-related Macular Degeneration (AMD)/Geographic Atrophy (GA); C90RF72-Frontotemporal Dementia (FTD); Facioscapulohumeral Muscular Dystrophy (FSHD); Fragile X Syndrome (FXS); Huntington's Disease; Glaucoma; Acromegaly; Achromatopsia (total color blindness); Ullrich congenital muscular dystrophy; Hereditary myopathy with lactic acidosis; X-linked spondyloepiphyseal dysplasia tarda; Neuropathic pain (Target: CPEB); Persistent Inflammation and injury pain (Target: PABP); Neuropathic pain (Target: miR-30c-5p); Neuropathic pain (Target: miR-195); Friedreich's Ataxia; Uncontrolled gout; Inflammatory pain (Target: Nav1.7 and Nav1.8); Choroideremia; Focal epilepsy; Alpha-1 Antitrypsin deficiency (AATD); Androgen Insensitivity Syndrome; Opioid-induced hyperalgesia (Target: Raf-1); Neurofibromatosis type 1; Stargardt's Disease; Dravet Syndrome; Retinitis Pigmentosa; and Parkinson's Disease.

[0231] Sequences

[0232] Table 1 below shows Cas7-11 sequences for trans-splicing.

TABLE 1

| SEQ ID | | |
|---|---|---|
| NO | ID | Sequence |
| 1 | huDiCas7- | MTTTMKISIEFLEPFRMTKWQESTRRNKNNKEFVRGQAFARWH |
| | 11 | RNKKDNTKGRPYITGTLLRSAVIRSAENLLTLSDGKISEKTCCPG |
| | | KFDTEDKDRLLQLRQRSTLRWTDKNPCPDNAETYCPFCELLGRS |
| | | GNDGKKAEKKDWRFRIHFGNLSLPGKPDFDGPKAIGSQRVLNR |
| | | VDFKSGKAHDFFKAYEVDHTRFPRFEGEITIDNKVSAEARKLLC |
| | | DSLKFTDRLCGALCVIRFDEYTPAADSGKQTENVQAEPNANLAE |
| | | KTAEQIISILDDNKKTEYTRLLADAIRSLRRSSKLVAGLPKDHDG |
| | | KDDHYLWDIGKKKKDENSVTIRQILTTSADTKELKNAGKWREF |
| | | CEKLGEALYLKSKDMSGGLKITRRILGDAEFHGKPDRLEKSRSV |
| | | SIGSVLKETVVCGELVAKTPFFFGAIDEDAKQTDLQVLLTPDNKY |
| | | RLPRSAVRGILRRDLQTYFDSPCNAELGGRPCMCKTCRIMRGITV |
| | | MDARSEYNAPPEIRHRTRINPFTGTVAEGALFNMEVAPEGIVFPF |
| | | QLRYRGSEDGLPDALKTVLKWWAEGQAFMSGAASTGKGRFRM |
| | | ENAKYETLDLSDENQRNDYLKNWGWRDEKGLEELKKRLNSGL |
| | | PEPGNYRDPKWHEINVSIEMASPFINGDPIRAAVDKRGTDVVTFV |
| | | KYKAEGEEAKPVCAYKAESFRGVIRSAVARIHMEDGVPLTELTH |
| | | SDCECLLCQIFGSEYEAGKIRFEDLVFESDPEPVTFDHVAIDRFTG |
| | | GAADKKKFDDSPLPGSPARPLMLKGSFWIRRDVLEDEEYCKALG |
| | | KALADVNNGLYPLGGKSAIGYGQVKSLGIKGDDKRISRLMNPAF |
| | | DETDVAVPEKPKTDAEVRIEAEKVYYPHYFVEPHKKVEREEKPC |
| | | GHQKFHEGRLTGKIRCKLITKTPLIVPDTSNDDFFRPADKEARKE |
| | | KDEYHKSYAFFRLHKQIMIPGSELRGMVSSVYETVTNSCFRIFDE |
| | | TKRLSWRMDADHQNVLQDFLPGRVTADGKHIQKFSETARVPFY |
| | | DKTQKHFDILDEQEIAGEKPVRMWVKRFIKRLSLVDPAKHPQKK |
| | | QDNKWKRRKEGIATFIEQKNGSYYFNVVTNNGCTSFHLWHKPD |
| | | NFDQEKLEGIQNGEKLDCWVRDSRYQKAFQEIPENDPDGWECK |
| | | EGYLHVVGPSKVEFSDKKGDVINNFQGTLPSVPNDWKTIRTNDF |
| | | KNRKRKNEPVFCCEDDKGNYYTMAKYCETFFFDLKENEEYEIPE |
| | | KARIKYKELLRVYNNNPQAVPESVFQSRVARENVEKLKSGDLV |
| | | YFKHNEKYVEDIVPVRISRTVDDRMIGKRMSADLRPCHGDWVE |
| | | DGDLSALNAYPEKRLLLRHPKGLCPACRLFGTGSYKGRVRFGFA |
| | | SLENDPEWLIPGKNPGDPFHGGPVMLSLLERPRPTWSIPGSDNKF |
| | | KVPGRKFYVHHHAWKTIKDGNHPTTGKAIEQSPNNRTVEALAG |
| | | GNSFSFEIAFENLKEWELGLLIHSLQLEKGLAHKLGMAKSMGFG |
| | | SVEIDVESVRLRKDWKQWRNGNSEIPNWLGKGFAKLKEWFRDE |
| | | LDFIENLKKLLWFPEGDQAPRVCYPMLRKKDDPNGNSGYEELK |
| | | DGEFKKEDRQKKLTTPWTPWA |
| 2 | NLS- | MKRTADGSEFESPKKKRKVTTTMKISIEFLEPFRMTKWQESTRR |
| | huDisC | NKNNKEFVRGQAFARWHRNKKDNTKGRPYITGTLLRSAVIRSA |
| | as7-11- | ENLLTLSDGKISEKTCCPGKFDTEDKDRLLQLRQRSTLRWTDKN |
| | NLS | PCPDNAETYCPFCELLGRSGNDGKKAEKKDWRFRIHFGNLSLPG |
| | | KPDFDGPKAIGSQRVLNRVDFKSGKAHDFFKAYEVDHTRFPRFE |
| | | GEITIDNKVSAEARKLLCDSLKFTDRLCGALCVIRFDEYTPAADS |
| | | GKQTENVQAEPNANLAEKTAEQIISILDDNKKTEYTRLLADAIRS |
| | | LRRSSKLVAGLPKDHDGKDDHYLWDIGKKKKDENSVTIRQILTT |
| | | SADTKELKNAGKWREFCEKLGEALYLKSKDMSGGLKITRRILGD |
| | | AEFHGKPDRLEKSRSVSIGSVLKETVVCGELVAKTPFFFGAIDED |
| | | AKQTDLQVLLTPDNKYRLPRSAVRGILRRDLQTYFDSPCNAELG |
| | | GRPCMCKTCRIMRGITVMDARSEYNAPPEIRHRTRINPFTGTVAE |
| | | GALFNMEVAPEGIVFPFQLRYRGSEDGLPDALKTVLKWWAEGQ |
| | | AFMSGAASTGKGRFRMENAKYETLDLSDENQRNDYLKNWGWR |
| | | DEKGLEELKKRLNSGLPEPGNYRDPKWHEINVSIEMASPFINGDP |
| | | IRAAVDKRGTDVVTFVKYKAEGEEAKPVCAYKAESFRGVIRSA |
| | | VARIHMEDGVPLTELTHSDCECLLCQIFGSEYEAGKIRFEDLVFE |
| | | SDPEPVTFDHVAIDRFTGGAADKKKFDDSPLPGSPARPLMLKGSF |
| | | WIRRDVLEDEEYCKALGKALADVNNGLYPLGGKSAIGYGQVKS |
| | | LGIKGDDKRISRLMNPAFDETDVAVPEKPKTDAEVRIEAEKVYY |
| | | PHYFVEPHKKVEREEKPCGHQKFHEGRLTGKIRCKLITKTPLIVP |
| | | DTSNDDFFRPADKEARKEKDEYHKSYAFFRLHKQIMIPGSELRG |
| | | MVSSVYETVTNSCFRIFDETKRLSWRMDADHQNVLQDFLPGRV |
| | | TADGKHIQKFSETARVPFYDKTQKHFDILDEQEIAGEKPVRMWV |
| | | KRFIKRLSLVDPAKHPQKKQDNKWKRRKEGIATFIEQKNGSYYF |
| | | NVVTNNGCTSFHLWHKPDNFDQEKLEGIQNGEKLDCWVRDSRY |
| | | QKAFQEIPENDPDGWECKEGYLHVVGPSKVEFSDKKGDVINNFQ |
| | | GTLPSVPNDWKTIRTNDFKNRKRKNEPVFCCEDDKGNYYTMAK |
| | | YCETFFFDLKENEEYEIPEKARIKYKELLRVYNNNPQAVPESVFQ |
| | | SRVARENVEKLKSGDLVYFKHNEKYVEDIVPVRISRTVDDRMIG |
| | | KRMSADLRPCHGDWVEDGDLSALNAYPEKRLLLRHPKGLCPAC |
| | | RLFGTGSYKGRVRFGFASLENDPEWLIPGKNPGDPFHGGPVMLS |
| | | LLERPRPTWSIPGSDNKFKVPGRKFYVHHHAWKTIKDGNHPTTG |
| | | KAIEQSPNNRTVEALAGGNSFSFEIAFENLKEWELGLLIHSLQLE |
| | | KGLAHKLGMAKSMGFGSVEIDVESVRLRKDWKQWRNGNSEIP |
| | | NWLGKGFAKLKEWFRDELDFIENLKKLLWFPEGDQAPRVCYPM |
| | | LRKKDDPNGNSGYEELKDGEFKKEDRQKKLTTPWTPWAKRTA |
| | | DGSEFESPKKKRKV |
| 3 | huCjcCas7- | MHTILPIHLTFLEPYRLAEWHAKADRKKNKRYLRGMSFAQWHK |
| | 11 | DKDGIGKPYITGTLLRSAVLNAAEELISLNQGMWAKEPCCNGKF |
| | | ETEKDKPAVLRKRPTIQWKTGRPAICDPEKQEKKDACPLCMLLG |
| | | RFDKAGKRHRDNKYDKHDYDIHFDNLNLITDKKFSHPDDIASER |
| | | ILNRVDYTTGKAHDYFKVWEVDDDQWWQFTGTITMHDDCSKA |
| | | KGLLLASLCFVDKLCGALCRIEVTGNNSQDENKEYAHPDTGIITS |
| | | LNLKYQNNSTIHQDAVPLSGSAHDNDEPPVHDNDSSLDNDTITL |
| | | LSMKAKEIVGAFRESGKIEKARTLADVIRAMRLQKPDIWEKLPK |
| | | GINDKHHLWDREVNGKKLRNILEELWRLMNKRNAWRTFCEVL |
| | | GNELYRCYKEKTGGIVLRFRTLGETEYYPEPEKTEPCLISDNSIPIT |
| | | PLGGVKEWIIIGRLKAETPFYFGVQSSFDSTQDDLDLVPDIVNTD |
| | | EKLEANEQTSFRILMDKKGRYRIPRSLIRGVLRRDLRTAFGGSGC |
| | | IVELGRMIPCDCKVCAIMRKITVMDSRSENIELPDIRYRIRLNPYT |
| | | ATVDEGALFDMEIGPEGITFPFVFRYRGEDALPRELWSVIRYWM |
| | | DGMAWLGGSGSTGKGRFALIDIKVFEWDLCNEEGLKAYICSRGL |
| | | RGIEKEVLLENKTIAEITNLFKTEEVKFFESYSKHIKQLCHECIINQ |
| | | ISFLWGLRSYYEYLGPLWTEVKYEIKIASPLLSSDTISALLNKDNI |
| | | DCIAYEKRKWENGGIKFVPTIKGETIRGIVRMAVGKRSGDLGMD |
| | | DHEDCSCTLCTIFGNEHEAGKLRFEDLEVVEEKLPSEQNSDSNKI |
| | | PFGPVQDGDGNREKECVTAVKSYKKKLIDHVAIDRFHGGAEDK |
| | | MKFNTLPLAGSFEKPIILKGRFWIKKDIVKDYKKKIEDAMVDIRD |
| | | GLYPIGGKTGIGYGWVTDLTILNPQSGFQIPVKKDISPEPGTYSTY |
| | | PSHSTPSLNKGHIYYPHYFLAPANTVHREQEMIGHEQFHKEQKG |
| | | ELLVSGKIVCTLKTVTPLIIPDTENEDAFGLQNTYSGHKNYQFFHI |
| | | NDEIMVPGSEIRGMISSVYEAITNSCFRVYDETKYITRRLSPEKKD |
| | | ESNDKNKSQDDASQKIRKGLVKKTDEGFSIIEVERYSMKTKGGT |
| | | KLVDKVYRLPLYDSEAVIASIQFEQYGEKNEKRNAKIRAAIKRNE |
| | | VIAEVARKNLIFLRSLTPEELKKVLQGEILVKFSLKSGKNPNDYL |
| | | AELHENGTERGLIKFTGLNMVNIKNVNEEDKDENDTWDWEKLN |
| | | IFHNAHEKRNSLKQGYPRPVLKFIKDRVEYTIPKRCERIFCIPVKN |
| | | TIEYKVSSKVCKQYKDVLSDYEKNFGHINKIFTTKIQKRELTDGD |
| | | LVYFIPNEGADKTVQAIMPVPLSRITDSRTLGERLPHKNLLPCVH |
| | | EVNEGLLSGILDSLDKKLLSIHPEGLCPTCRLFGTTYYKGRVRFG |
| | | FANLMNKPKWLTERENGCGGYVTLPLLERPRLTWSVPSDKCDV |
| | | PGRKFYIHHNGWQEVLRNNDITPKTENNRTVEPLAADNRFTFDV |
| | | YFENLREWELGLLCYCLELEPGMGHKLGMGKPMGFGSVKIAIE |
| | | RLQTFTVHQDGINWKPSENEIGVYVQKGREKLVEWFTPSAPHKN |
| | | MEWNGVKHIKDLRSLLSIPGDKPTVKYPTLNKDAEGAISDYTYE |
| | | RLSDTKLLPHDKRVEYLRTPWSPWNAFVKEAEYSPSEKSDEKGR |
| | | ETIRTKPKSLPSVKSIGKVKWFDEGKGFGILIMDDGKEVSISKNSI |
| | | RGNILLKKGQKVTFHIVQGLIPKAEDIEIAK |
| 4 | hsmCas7- | MTKIPISLTFLEPFRLVDWVSESERDKSEFLRGLSFARWHRIKNQ |
| | 11 | REDENQGRPYITGTLLRSAVIKAAEELIFLNGGKWQSEECCNGQF |
| | | KGSKAKYRKVECPRRRHRATLKWTDNTCSDYHNACPFCLLLGC |
| | | LKPNSKENSDIHFSNLSLPNKQIFKNPPEIGIRRILNRVDFTTGKAQ |
| | | DYFYVWEVEHSMCPKFQGTVKINEDMPKYNVVKDLLISSIQFVD |
| | | KLCGALCVIEIGKTKNYICQSFSSNIPEEEIKKLAQEIRDILKGEDA |
| | | LDKMRVLADTVLQMRTKGPEIVNELPRGIEKKGGHWLWDKLRL |
| | | RKKFKEIANNYKDSWQELCEKLGNELYISYKELTGGIAVKKRIIG |
| | | ETEYRKIPEQEISFLPSKAGYSYEWIILGKLISENPFFFGKETKTEE |
| | | QIDMQILLTKDGRYRLPRSVLRGALRRDLRLVIGSGCDVELGSK |
| | | RPCPCPVCRIMRRVTLKDARSDYCKPPEVRKRIRINPLTGTVQKG |
| | | ALFTMEVAPEGISFPFQLRFRGEDKFHDALQNVLVWWKEGKLFL |
| | | GGGASTGKGRFKLEIEHVLKWDLKNNFHSYLQYKGLRDKGDFN |
| | | SIKEIEGLKVETEEFKVKKPFPWSCVEYTIFIESPFVSGDPVEAVL |
| | | DSSNTDLVTFKKYKLEESKEVFAIKGESIRGVFRTAVGKNEGKLT |
| | | TENEHEDCTCILCRLFGNEHETGKVRFEDLELINDSAPKRLDHVA |
| | | IDRFTGGAKEQAKFDDSPLIGSPDSPLEFTGIVWVRDDIDEEEKK |
| | | ALKSAFLDIKSGYYPLGGKKGVGYGWVSNLKIESGPEWLRLEV |
| | | QEKSSQENVLSPVILSEVMDIEFNPPKIDENGVYFPYAFLRPLNEV |
| | | KRTREPIGHNEWKKSLISGYLTCRLELLTPLIIPDTSEEVIKEKVN |
| | | NGEHPVYKFFRLGGHLCIPAAEIRGMISSVYEALTNSCFRVEDEK |
| | | RLISWRMTAEEAKRPDPKKSEEQNRMRFRPGRIIKKDKKFYAQE |
| | | MLELRIPVYDNKDKRNEISQNDPTRPSEYNHPTEPERIFFSNAEKI |
| | | RNFLKRNSNYLHGSTPLLFRQWSISNRYDKIALIGNKSQGHLKFT |
| | | GPNKIEVSEGTKCPKYETIPGRDEWDKAVHNYVEPGKFVTVISR |
| | | KKGQKPKAVQRRRNVPAFCCYDYNTNRCFVMNKRCERVFKVS |
| | | RDKPKYEIPPDAIRRYEHVLRKYRENWERYDIPEVFRTRLPGDGE |
| | | TLNEGDLVYFRLDENNRVLDIIPVSISRISDTQYLGRRLPDHLRSC |
| | | VRECLYEGWGDCKPCKLSLFPEKMWIRINPEGLCPACHLFGTQV |
| | | YKGRVRFGFARAGSNWKFREEQLTLPRFETPRPTWVIPKRKDEY |
| | | QIPGRKFYLHHNGWEEIYKKNKKNEIKKEKNNATFEVLKQGTFY |
| | | FKVFFENLELWELGLLIFSAELGGEEFAHKLGHGKALGFGSVKIS |
| | | VDKIILRRDPGQFEQRGQKFKRDAVDKGFCVLENRFGKTNFKIY |
| | | LNNFLQLLYWPNNKKVKVRYPYLRQEDDPEKLPGYVELKKHQ |
| | | MLKDDNRYSLFARPRAVWLKWTEMVQRDKS |
| 5 | hvsCas7- | MKSIPITLTFLEPYRILPWAEKGKRDKKEYLRGANYVRLHKDKN |
| | 11 | GKFKPYITGTLIRSAVLSAIEMLLDITNGEWNGKECCLAKFHTEG |
| | | EKPSFLRKKPIYIRAEKDEICTSRETACPLCLILGREDKAEKKEKD |
| | | KEKFDVHFSNLNLYSSKEFSTIEELAPKRALNRIEQYTGKAQDYF |
| | | TVYEALNKEFWTFKGRIRIKEDIYDKVTDLLFSALRCVEKIAGAL |
| | | CRIEIDKEPSQQKGFVKRQLSKQAKEDIEKIFQVVKDAQKLRLLS |
| | | DCFRELTRMANKDELALPLGPEDDGHYLWDKIKVEGKTLRIFLR |
| | | NCFSQYKDNWLCFCDEASKKGYQKYREKRHKLTDRELPTATPK |
| | | HFAEKKDPQISPIYIDKDDKVYEWIIVGRLIAQTPFHFGDEEKAEG |
| | | AILLTPDNRFRLPRTALRGILRRDLKLAGASACEVEVGRSEPCPC |
| | | DVCKIMRRVTLLDTVSEDLRDFLPELRKRIRINPQSGTVAEGALF |
| | | DTEVGPEGLSFPFVLRYKCEKLPDSLTTVLCWWQEGLAFLSGES |
| | | ATGKGRFRLEINGAFVWDLQKGLFNYIKNHGFRGEERLFLEGNE |
| | | AELEKMGIQINTELLQPEMIKKEKNFTDFPYDLIKYQLNISSPLLL |
| | | NDPIRAIALYEGEGKAPDAVFFKKYVFENGKIEEKPCFKAESIRGI |
| | | FRTAVGRIKNVLTKNHEDCICVLCHLFGNVHETGRLKFEDLKIVS |
| | | GQEEKFFDHVAIDRFLGGAKEKYKFDDKPIIGAPDTPIVLEGKIW |
| | | VKKDINDEAKETLSQAFSDINTGIYYLGANGSIGYGWIEEVKALK |
| | | APSWLKIKEKPNFEKDTSLNISAIMNEFKKDIQTLNLDKTYLPYG |
| | | FLKLLEKVKRTSSPITHERFYENHLTGFIECSLKVLSPLIIPDTETPE |
| | | KEENGHKYYHFLKIDNKPIIPGAEIRGAVSSIYEALTNSCFRVFGE |
| | | KKVLSWRMEGKDAKEFMPGRVSKKKGKLYMVKMQALRLPVY |
| | | DNPALANEIRSGSIYEKYKNSKVEIIFFQTVEGIRKFLRGNFNNVE |
| | | WKKVLVTGIDPLAILPSQKIPGNDKWVKNLQSKISPVRGYFKFTG |
| | | PNKIETKRREEEKDEKLRTKANKVSCLQKDKWYEAMHNHVEY |
| | | KQDYTPPNSPKTEPLERPRNIPCFVCSDKEKIYRMTKRCERVFVS |
| | | LGENAPKYEIPISAIKRYEVILSAYRENWERNKTPELFRTRLPGDG |
| | | RTLNEDDLVYFRADENEKVKDIIPVCISRIVDEVPLIKRLSQELWP |
| | | CVLAECPLLGFECKKCELEGLPEKIWFRINKDGLCPACRLFGTQI |
| | | YKSRVRFSFAYAKNWKFYDGYITLPRLESPRATWLILKEKDKHY |
| | | IKYKVCGRKFYLHNSTYEDIINNSKKEKEKKTENNASFEVLKEGE |
| | | FTFKVYFENLENWELGLLLLSLTGLGEAIKIGHAKPLGFGSVKIE |
| | | AKKIYFREEAGKFHPCEKADEYLKKGLNKLTSWFGKNEINEHM |
| | | RNLLLFMTYYQNLPKVKYPDFDGYAKWRCSYVEQDKVEYFQN |
| | | RWIVAS |
| 6 | dpbaCas7- | MASEDDDTPTLRKVLKDEINGQEDMWRKFCEALGNSLYDLSKK |
| | 11 | AKERKRTEALPRLLGETEIYGLPMRENKEDEPLPSSLTYKFKWLI |
| | | AGELRAETPFFFGTEVQEGQTSATILLNRDGYFRLPRSVIRGALR |
| | | RDLRLVMGNDGCNMPIGGQMCECGVCRVMRHIVIEDGLSDCKI |
| | | PPEVRHRIRLNCHTGTVEEGALFDMETGYQGMTFPFRLYCETEN |
| | | SDLDSYLWEVLNNWQNGQSLFGGDTGTGFGRFELTEPKVFLWN |
| | | FSKKEKHEAYLLNRGFKGQMPVQDVKTKSFKTKTWFQIHRELDI |
| | | SPKKLPWYSTDYRFNVTSPLISRDPIGAMLDPRNTDAIMVRKTVF |
| | | CPDPNAKNRPAPATVYMIKGESIRGILRSIVVRNEELYDTDHEDC |
| | | DCILCRLFGSIHQQGSLRFEDAEVQNSVSDKKMDHVAIDRFTGG |
| | | GVDQMKFDDYPLPGCPAQPLILEGKFWVKDDIDDESKSALEKAF |
| | | ADFRDGLVSLGGLGAIGYGQIGDFELIGGSADWLNLPKPEENRT |
| | | DVPCGDRSAQGPEIKISLDADKIYHPHFFLKPSDKNVYRERELVS |
| | | HAKKKGPDGKSLFTGKITCRLSTEGPVFIPDTDLGEDYFEMQASH |
| | | KKHKNYGFFRINGNVAIPGSSIRGMISSVFEALTNSCFRVFDQER |
| | | YLSRSEKPDPTELTKYYPGKVKRDGNKFFILKMKDFFRLPLYDF |
| | | DFEGEAESLRPNYDEDRNEEENKGKNKNTQKVKNAVEFNIKMA |
| | | GFAKHNRDFLKKYKEQEIKDIFMGKKKVYFTAGKHKPNEAHDN |
| | | DKIALLTKGSNKKAEKGYFKFTGPGMVNVKAGVEGEECDFHID |
| | | ESDPDVYWNMSSILPHNQIKWRPSQKKEYPRPVLKCVKDGTEY |
| | | VMLKRSEHVFAEASSEDSYPVPGKVRKQFNSISRDNVQNTDHLS |
| | | SMFQSRRLHDELSHGDLVYFRHDEKRKVTDIAYVRVSRTVDDR |
| | | PMGKRFKNESLRPCNHVCVEGCDECPDRCKELEDYFSPHPEGLC |
| | | PACHLFGTTDYKGRVSFGLGWHESNTPKWYMPEDNSQKGSHLT |
| | | LPLLERPRPTWSMPNKKSEIPGRKFYVHHPWSVDKIRNRQFDPA |
| | | KEKQPDDVIKPNENNRTVEPLGKGNEFTFEVRFNNLREWELGLL |
| | | LYSLELEDNMAHKLGMGKALGMGSARIKAEAIELRCESAGQNA |
| | | ELKDKAAFVRKGFEFLEIDKPGENDPMNFDHIRQLRELLWFLPE |
| | | NVSANVRYPMLEKEDDGTPGYTDFIKQEEPSTGKRNPSYLSSEK |
| | | RRNILQTPWKHWYLIPPFQASAQSETVFEGTVKWFDDKKGFGFI |
| | | KINDGGKDVFVHHSSIVGTGFKSLNEGDSVAFKMGVGPKGPCAE |
| | | KVKKIGN |
| 7 | CsbCas7- | MNITVELTFFEPYRLVEWFDWDARKKSHSAMRGQAFAQWTWK |
| | 11 | GKGRTAGKSFITGTLVRSAVIKAEELLSLNNGKWEGVPCCNGS |
| | | FQTDESKGKKPSFLRKRHTLQWQANNKNICDKEEACPFCILLGR |
| | | FDNAGKVHERNKDYDIHFSNFDLDHKQEKNDLRLVDIASGRILN |
| | | RVDFDTGKAKDYFRTWEADYETYGTYTGRITLRNEHAKKLLLA |
| | | SLGFVDKLCGALCRIEVIKKSESPLPSDTKEQSYTKDDTVEVLSE |
| | | DHNDELRKQAEVIVEAFKQNDKLEKIRILADAIRTLRLHGEGVIE |
| | | KDELPDGKEERDKGHHLWDIKVQGTALRTKLKELWQSNKDIG |
| | | WRKFTEMLGSNLYLIYKKETGGVSTRFRILGDTEYYSKAHDSEG |
| | | SDLFIPVTPPEGIETKEWIIVGRLKAATPFYFGVQQPSDSIPGKEKK |
| | | SEDSLVINEHTSFNILLDKENRYRIPRSALRGALRRDLRTAFGSGC |
| | | NVSLGGQILCNCKVCIEMRRITLKDSVSDFSEPPEIRYRIAKNPGT |
| | | ATVEDGSLFDIEVGPEGLTFPFVLRYRGHKFPEQLSSVIRYWEEN |
| | | DGKNGMAWLGGLDSTGKGRFALKDIKIFEWDLNQKINEYIKER |
| | | GMRGKEKELLEMGESSLPDGLIPYKFFEERECLFPYKENLKPQW |
| | | SEVQYTIEVGSPLLTADTISALTEPGNRDAIAYKKRVYNDGNNAI |
| | | EPEPRFAVKSETHRGIFRTAVGRRTGDLGKEDHEDCTCDMCIIFG |
| | | NEHESSKIRFEDLELINGNEFEKLEKHIDHVAIDRFTGGALDKAK |
| | | FDTYPLAGSPKKPLKLKGRFWIKKGFSGDHKLLITTALSDIRDGL |
| | | YPLGSKGGVGYGWVAGISIDDNVPDDFKEMINKTEMPLPEEVEE |
| | | SNNGPINNDYVHPGHQSPKQDHKNKNIYYPHYFLDSGSKVYRE |
| | | KDIITHEEFTEELLSGKINCKLETLTPLIIPDTSDENGLKLQGNKPG |
| | | HKNYKFFNINGELMIPGSELRGMLRTHFEALTKSCFAIFGEDSTL |
| | | SWRMNADEKDYKIDSNSIRKMESQRNPKYRIPDELQKELRNSGN |
| | | GLFNRLYTSERRFWSDVSNKFENSIDYKREILRCAGRPKNYKGGI |
| | | IRQRKDSLMAEELKVHRLPLYDNFDIPDSAYKANDHCRKSATCS |
| | | TSRGCRERFTCGIKVRDKNRVFLNAANNNRQYLNNIKKSNHDL |
| | | YLQYLKGEKKIRFNSKVITGSERSPIDVIAELNERGRQTGFIKLSG |
| | | LNNSNKSQGNTGTTFNSGWDRFELNILLDDLETRPSKSDYPRPRL |
| | | LFTKDQYEYNITKRCERVFEIDKGNKTGYPVDDQIKKNYEDILDS |
| | | YDGIKDQEVAERFDTFTRGSKLKVGDLVYFHIDGDNKIDSLIPVR |
| | | ISRKCASKTLGGKLDKALHPCTGLSDGLCPGCHLFGTTDYKGRV |
| | | KFGFAKYENGPEWLITRGNNPERSLTLGVLESPRPAFSIPDDESEI |
| | | PGRKFYLHHNGWRIIRQKQLEIRETVQPERNVTTEVMDKGNVFS |
| | | FDVRFENLREWELGLLLQSLDPGKNIAHKLGKGKPYGFGSVKIKI |
| | | DSLHTFKINSNNDKIKRVPQSDIREYINKGYQKLIEWSGNNSIQK |
| | | GNVLPQWHVIPHIDKLYKLLWVPFLNDSKLEPDVRYPVLNEESK |
| | | GYIEGSDYTYKKLGDKDNLPYKTRVKGLTTPWSPWNPFQVIAE |
| | | HEEQEVNVTGSRPSVTDKIERDGKMV |
| 8 | DsbaCas7- | MKITLRFLEPFRMLDWIRPEERISGNKAFQRGLTFARWHKSKAD |
| | 11 | DKGKPFITGTLLRSAVIRAAEHLLVLSKGKVGEKACCPGKFLTET |
| | | DTETNKAPTMFLRKRPTLKWTDRKGCDPDFPCPLCELLGPGAVG |
| | | KKEGEAGINSYVNFGNLSFPGDTGYSNAREIAVRRVVNRVDYAS |
| | | GKAHDFFRIFEVDHIAFPCFHGEIAFGENVSSQARNLLQDSLRFT |
| | | DRLCGALCVIRYDGDIPKCGKTAPLPETESIQNAAEETARAIVRV |
| | | FHGGRKDPEQAQIDKAEQIQLLSAAVRELGRDKKKVSALPLNHE |
| | | GKEDHYLWDKKAGGETIRTILKAAAEKEAVANQWRQFCIELSE |
| | | ELYKEAKKAHGGLEPARRIMGDAEFSDKSVPDTVSHSIGISVEKE |
| | | TIIMGTLKAETPFFFGIESKEKKQTDLMLLLDGQNHYRIPRSALR |
| | | GILRRDIRSVLGTGCNAEVGGRPCLCPVCRIMKNITVMDTRSSTD |
| | | TLPEVRPRIRLNPFTGSVQEKALFNMEMGTEGIEFPFVLSYRGKK |
| | | TLPKELRNVLNWWTEGKAFLGGAASTGKSIFQLSDIHAFSSDLS |
| | | DETARESYLSNHGWRGIMENSIVHESPLEGGAGGCSFGLSDLPK |
| | | LGWHAEDLKLSDIEKYKPFHRQKISVKITLNSPFLNGDPVRALTE |
| | | DVADIVSFKKYTQGGEKIIYAYKSESFRGVVRTALGLRNQGNDD |
| | | ITGKKNVPLIALTHQDCECMLCRFFGSEYEAGRLYFEDLTFESEP |
| | | EPRRFDHVAIDRFTGGAVNQKKFDDRSLVPGKEGFMTLIGCFW |
| | | MRKDKELSRNEIEELGKAFADIRDGLYPLGAKGSMGYGQVAEL |
| | | SIVDDEDSDDENNPAKLLAESMKNASPSLGTPTSLKKKDAGLSL |
| | | RFDENADYYPYYFLEPEKSVHRDPVPPGHEEAFRGGLLTGRITCR |
| | | LTVRTPLIVPNTETDDAFNMKEKAGKKKDAYHKSYRFFTLNRVP |
| | | MIPGSEIRGMISSVFEALSNSCFRIFDEKYRLSWRMDADVKELEQ |
| | | FKPGRVADDGKRIEEMKEIRYPFYDRTYPERNAQNGYFRWDARI |
| | | SLTDNSMRKMEKDGVPRNVIYKLNTLKNKAYKSEKSFLFDLKN |
| | | KAGGVGRYKKLVLKHAEVRGGEIPYYSHPTPTDCKLLSLVGPNR |
| | | QLCRQDTLVQYRIIKHRRGAKPEEDFMFVGTPSENQKGHKENND |
| | | HGGGYLKISGPNKIEKENVLTSGVPSVPENMGAVVHNCPPRLVE |
| | | VTVRCGRKQEEECKRKRLVPEYVCADPEKKVTYTMTKRCERIFL |
| | | EKSRRIIPFTNDAVDKFEILVKEYRRNAEQQDTPEAFQTILPENGT |
| | | VNPGDLLYFREEKGKAAEIVPVRISRKVDDRHIGKRIDPELRPCH |
| | | GEWIEDGDLSKLDAYPAEKKLLTRHPKGLCPACRVFGTGSYKSR |
| | | VRFGFAALKGTPKWLKEDPAEPSQGKGITLPLLERPRPTWAVLH |
| | | NDKENSEIPGRKFYVHHNGWKGISEGIHPISGENIEPDENNRTVE |
| | | VLDKGNRFVFELSFENLEPRELGLLIHSLQLEKGLAHKLGMAKS |
| | | MGFGSVEIDVESVRVKHRSGEWDYKDGETVDGWIEEGKRGVA |
| | | AKGKANDLRKLLYLPGEKQNPHVHYPTLKKEKKGDPPGYEDLK |
| | | KSFREKKLNRRKMLTTLWEPWHK |
| 9 | CmaCas7- | MLKLKVKITYFQPFRVIPWIKEDDRNSDRNYLRGGTFARWHKD |
| | 11 | KKDDIHGKPYITGTLLRSALFTEIEKIKIHHSDFIHCCNAIDRTEGK |
| | | HQPSFLRKRPVYTENKNIQACNKCPLCLIMGRGDDRGEDLKKKK |
| | | HYNGKHYQNWTVHFSNFDTQATFYWKDIVQKRILNRVDQTCG |
| | | KAKDFFKVCEVDHIACPTLNGIIRINDEKLSQEEISKIKQLIAVGL |
| | | AQIESLAGGICRIDITNQNHDDLIKSFFETKPSKILQPNLKESGEER |
| | | FELAKLELLAEYLTQSFDANQKEQQLRRLADAIRDLRKYSPDYL |
| | | KDLPKGKKGGRTSIWNKKVADDFTLRDCLKNQKIPNELWRQFC |
| | | EGLGREVYKISKNISNRSDAKPRLLGETEYAGLPLRKEDEKEYSP |
| | | TYQNQESLPKTKWIISGELQAITPFYIGHVNKTSHTRSTIFLNMNG |
| | | QFCIPRSTLRGALRRDLRLVFGDSCNTPVGSRVCYCQVCQIMRCI |
| | | KFEDALSDVDSPPEVRHRIRLNCHTGVVEEGALFDMETGFQGMI |
| | | FPFRLYYESKNEIMSQHLYEVLNNWTNGQAFFGGEAGTGFGRFK |
| | | LLNNEVFLWEIDGEEEDYLQYLFSRGYKGIETDEIKKVADPIKW |
| | | KTLFTKLEIPPEKIPLTQLNYTLTIDSPLISRDPIAAMLDNRNPDAV |
| | | MVKKTILVYEQDSSTHKNVPKEVPKYFIKSETIRGLLRSIISRTEIK |
| | | LEDGKKERIFNLDHEDCDCLQCRLFGNVHQQGILRFEDAEITNK |
| | | NVSDCCIDHVAIDRFTGGGVEKMKFNDYPLSASPKNCLNLKGSI |
| | | WITSALKDSEKEALSKALSELKYGYASLGGLSAIGYGRVKELTL |
| | | EENDIIQLTEITESNLNSQSRLSLKPDVKKELSNNHFYYPHYFIKP |
| | | APKEVVRESRLISHVQGHDTEGEFLLTGKIKCRLQTLGPLFIANN |
| | | DKGDDYFELQHNNPGHLNYAFFRINDHIAIPGASIRGMISSVFETL |
| | | THSCFRVMDDKKYLTRRVIPESETTQKRKSGRYQVEESDPDLFP |
| | | GRVQKKGNKYKIEKMDEIVRLPIYDNFSLVERIREYHYSEECASY |
| | | VPSVKKAIDYNRMLAQAADSNREFLYNHPEAKSILQGKKEVYYI |
| | | LHKQESKNRGKTKEINPNARYACLTDENTPGSRKGFIKFTGPDM |
| | | VTVNKELKSKIAPIYDPEWEKDIPDWERSNQESNHKYSFILHNEI |
| | | EMRSSQKKKYPRPVFICKKNGVEYRMQKRCERIFDFTKEEEKDK |
| | | EIVIPQKVVSQYNAILKDNKENTETIPGLFNSKMVNKELEDGDLV |
| | | YFKYKEGKVTELTPVAISRKTDNKPMGKRFPKISINGKMKPNDS |
| | | LRSCSHTCTEDCDDCPNLCESVKDYFKPHPDGLCPACHLFGTTF |
| | | YKSRLSFGLAWLENNAKWYISNDFQQKDSKKEKGGKLTLPLLE |
| | | RPRPTWSMPNNNAEVPGRKFYVHHPWSVENIKNNQGNQKDISL |
| | | KPDSDAIKIKENNRTIEPLGKDNVFNFEISFNNLRDWELGLLLYAI |
| | | ELEDHLAHKLGMAKAFGMGSVKIEIKNLLIKGSINDISKAELIKK |
| | | GFKKLGIDSLEKDDLSEYLHIKQLREILWFSDKPVGTIEYPKLEN |
| | | KTNSRIPSYTDFVQEKDHETGFKNPKYQNLKSRLHILQNPWNAW |
| | | WKNEE |
| 10 | CbfCas7- | MSKTDDKIDIKLTFLEPYRMVNWLENGLRMTDPRYLRGLSFAR |
| | 11 | WHRNKNGKAGRPYITGTLLRSAVIRAAEELLSLNLGKWGKQLC |
| | | CPGQFETEREMRKNKTFLRRRPTPAWSAETKKEICTTHGSACAF |
| | | CLLLGRRLHGGKEDVNEDAPGSCRKPVGFGNLSLPFQPTKRQIQ |
| | | DVCKERVLNRVDFRTGKAQDYFRVFEIDHEDWGVYTGEITITEP |
| | | RVQEMLEASLKFVDTLCGALCRIEIVGSADETKRTTSSKEGCPAS |
| | | TTTRDCSSSENDDTSPEDPVREDLKKIAHVIANAFQNSGNREKVH |
| | | ALADAIRAMRLEESSIINTLPKGKSEKTTEQIEVNKHYLWDEIPV |
| | | NDTSVRHILIEQWRRWQSKKDDPEWWKFCDFLGECLYKEYKKL |
| | | TSGIQSRARVMGETEYYGALGMPDKVIPLLKSDKTKEWILVGSL |
| | | KAETPFFFGLETEQTEEVEHTSLRLVMDKKGRFRIPRSVLRGALR |
| | | RDMRIAFDSGCDVKLGSPLPCDCSVCQVMRSITIKDSRSEAGKLP |
| | | QIRHRIRLNPFSGTVDEGALFDIEVAPEGVIFPFVMRYRGEEFPPA |
| | | LLSVIRYWQDGKAWLGGEGATGKGRFALAKDLKMYEWKLED |
| | | KSLHAYIDTYGHRGNEHAIGTGQGIDGFRSGSLSDLLSDISKESFR |
| | | DPLASYHNYLDKRWIKVGYQITIGAPLLSADPIGALLDPNNVDAI |
| | | VFEKMKLDGDQVKYLPAIKGETIRGIVRTALGKRNNLLAKNDH |
| | | DDCTCSLCAIFGNENETGKIRFEDLEVYDKDIAKKIDHVAIDRFT |
| | | GGARDQMKFDTLPLIGSPERPLRLKGLFWMRRDVSPDEKARILL |
| | | AFLEIREGLYPIGGKTGSGYGWVSDLEFDGDAPEAFKEMNSKRG |
| | | KQASFKEKISFRYPSGAPKHIQNLKATSFYYPHYFLEPGSKVIREQ |
| | | KMIGHEQYYESYPSGASGEKLLSGRIICSMTTHTPLIVPDTGVIKD |
| | | PENKHATYDFFQMNNAIMIPGSEIRGMISAVYEAMTNSCFRIFHE |
| | | KQYLTRRISPEDKELREFIPGIVRIINGDVYIEKAEREYRLPLYDD |
| | | VHIITNYEELEYEKYIKKNPGREQKIKNAHRFNKNIARIAESNRN |
| | | YLCSLDRAVRREILSGRKKVNFRLVKVNDNKNPDKEAVELCKT |
| | | GPLEGLVKFSGLNAVNISNLRPGTAEEGFDAKWDMWSLNIILNR |
| | | MDVRNSQKKEYPRPALHFNHDGKEYTIPKRCERVFVRAEAGKR |
| | | AETEGSYKVPRKVQEQYQNILRDYESNIGHIDNTFRTLIENCGLN |
| | | NGSLVYFKPDNSRKEVVAITPVKISRKTDRLPQGDRFPHTSSDLR |
| | | PCVRDCLDTEGDIRMLENSPFKRLFHIHPEGLCPACQLFGTTNYR |
| | | GRVRFGFASLSDGPKWFRKDEGNETCHITLPLLERPRPTWSMPD |
| | | DTSTIPGRKFYVHHMGYETVKKNQRTLVKTENNRTVKALDKEN |
| | | EFTFEVFFENLREWELGLLLHCLELEPEMGHKLGMGKPLGFGSV |
| | | KIRIDKLQKCVVNVKDGCVLWEPEEDKIQHYIAKGLGKLTTWFG |
| | | KEWDRLEHIQGLRSLQRLLPL |
| 11 | sstCas7- | MIINITVKFLGPFRMLEWTDPDNRNRKNREFMRGQAFARWHNS |
| | 11 | NPQKGSQPYITGTLVRSAVIRSAENLLMLSEGKVGKEKCCPGEFR |
| | | TENRKKRDAMLHLRQRSTLQWKTDKPLCNGKSLCPICELLGRRI |
| | | GKTDEVKKKGDFRIHFGNLTPLNRYDDPSDIGTQRTLNRVDYAT |
| | | GKAHDFFKVWEIDHSLLSVFQGKISIADNIGDGATKLLEDSLRFT |
| | | DRLCGAICVISYDCIENSDGKENGKTGEAAHIMGESDAGKTDAE |
| | | NIANAIADMMGTAGEPEKLRILADAVRALRIGKNTVSQLPLDHE |
| | | GKENHHLWDIGEGKSIRELLLEKAESLPSDQWRKFCEDVGEILY |
| | | LKSKDPTGGLTVSQRILGDEAFWSKADRQLNPSAVSIPVTTETLI |
| | | CGKLISETPFFFGTEIEDAKHTNLKVLLDRQNRYRLPRSAIRGVLR |
| | | RDLRTAFGGKGCNVELGGRPCLCDVCRIMRGITIMDARSEYAEP |
| | | PEIRHRIRLNPYTGTVAEGALFDMELGPQGLSFDFILRYRGKGKSI |
| | | PKALRNVLKWWTKGQAFLSGAASTGKGIFRLDDLKYISFDLSDK |
| | | DKRKDYLDNYGWRNRIEALSLEKMPLDRMNDYAEPLWQKVSV |
| | | EIEIGSPFLNGDPIRALIEKDGSDIVSFRKYADDSGKEVYAYKAES |
| | | FRGVVRAALARQHFDKEGKPLDKEGKPLLTLIHQDCECLICRLF |
| | | GSEHETGRLRFEDLLFDPQPEPMIFDHVAIDRFTGGAVDKKKFD |
| | | DCSLPGTPGHPLTLKGCFWIRKELEKPDEDKSEREALSKALADIH |
| | | NGLYPLGGKGAIGYGQVMNLKIKGAGDVIKAALQSESSRMSAS |
| | | EPEHKKPDSGLKLSFDDKKAVYYPHYFLKPAAEEVNRKPIPTGH |
| | | ETLNSGLLTGKIRCRLTTRTPLIVPDTSNDDFFQTGVEGHESYAFF |
| | | SVNGDIMLPGSEIRGMLSSVYEALTNSCFRVFDEGYRLSWRMEA |
| | | DRNVLMQFKPGRVTDNGLRIEEMKEYRYPFYDRDCSDKKSQEA |
| | | YFDEWERSITLTDDSLEKMAERKGDISPKDLKVLKSLKGKNYKS |
| | | TEGLLAAFKDKGGDTGGNILGLIFKYAERIGDVPRYEHPTDTDR |
| | | MMLSLSEYNRNQKSDGKRAYKIIKPASKLGKGAYFMFAGTSVE |
| | | NKRICNPACTDKANKSVKGYLKISGPNKLEKYNISEPELDGVPED |
| | | RNCQIIHNRIYLRKIFVANAKKRKERDRLVGEFACYDPEKKVTYS |
| | | MTKRCERIFIKDRGRTLPITHEASELFEILVQEYRENAKRQDTPEV |
| | | FQTLLPDNGRLNPGDLVYFREEKGKTVEIIPVRISRKIDDSPIGKR |
| | | LREDLRPCHGEWIEGDDLSQLSEYPEKKLFTRNTEGLCPACRLFG |
| | | TGAYKGRLRFGFAKLENDPKWLMKNSDGPSHGGPLTLPLLERP |
| | | RPTWSMPDDTLNRLKKDGKQEPKKQKGKKGPQVPGRKFYVHH |
| | | DGWKEINCGCHPTTKENIVQNQNNRTVEPLDKGNTFSFEICFENL |
| | | EPYELGLLLYTLELEKGLAHKLGMAKPMGFGSIDIEVENVSLRT |
| | | DSGQWKDANEQISEWTDKGKKDAGKWFKTDWEAAEHIKNLKK |
| | | LLFLPGEEQNPRVIYPALKQKDIPNSRLPGYEELKKNLNMEKRKE |
| | | MLTTPWAPWHPIKK |
| 12 | hvmCas7- | MTQITIQVTFFHPFRVVPWNHRDHRKTDRKYLRGGTFAKWHCT |
| | 11 | ASEGKSGRPYITGTLLRSALFAEIEKLIAFHDPFKCCRGKDKTEN |
| | | GNAKPLFLRRRPRADCDPCGTCPLCLLMGRSDTVRRDAKKQKK |
| | | DWSVHFCNLREATERSFNWKETAIERIVNRVDPSSGKAKDYMRI |
| | | WEIDPLVCSQFNGIITINLDTDNAGKVKLLMAAGLAQINILAGSIC |
| | | RADIISEDHDALIKQFMAIDVREPEVSTSFPLQDDELNNAPAGCG |
| | | DDEISTDQPVGHNLVDRVRISKIAESIEDVESQEQKAQQLRRMAD |
| | | AIRDLRRSKPDETTLDALPKGKTDKDNSVWDKPLKKDILPSPRM |
| | | PASEDDDTPTLRKVLKDEINGQEDMWRKFCEALGNSLYDLSKK |
| | | AKERKRTEALPRLLGETEIYGLPMRENKEDEPLPSSLTYKFKWLI |
| | | AGELRAETPFFFGTEVQEGQTSATILLNRDGYFRLPRSVIRGALR |
| | | RDLRLVMGNDGCNMPIGGQMCECGVCRVMRHIVIEDGLSDCKI |
| | | PPEVRHRIRLNCHTGTVEEGALFDMETGYQGMTFPFRLYCETEN |
| | | SDLDSYLWEVLNNWQNGQSLFGGDTGTGFGRFELTEPKVFLWN |
| | | FSKKEKHEAYLLNRGFKGQMPVQDVKTKSFKTKTWFQIHRELDI |
| | | SPKKLPWYSTDYRFNVTSPLISRDPIGAMLDPRNTDAIMVRKTVF |
| | | CPDPNAKNRPAPATVYMIKGESIRGILRSIVVRNEELYDTDHEDC |
| | | DCILCRLFGSIHQQGSLRFEDAEVQNSVSDKKMDHVAIDRFTGG |
| | | GVDQMKFDDYPLPGCPAQPLILEGKFWVKDDIDDESKSALEKAF |
| | | ADFRDGLVSLGGLGAIGYGQIGDFELIGGSADWLNLPKPEENRT |
| | | DVPCGDRSAQGPEIKISLDADKIYHPHFFLKPSDKNVYRERELVS |
| | | HAKKKGPDGKSLFTGKITCRLSTEGPVFIPDTDLGEDYFEMQASH |
| | | KKHKNYGFFRINGNVAIPGSSIRGMISSVFEALTNSCFRVFDQER |
| | | YLSRSEKPDPTELTKYYPGKVKRDGNKFFILKMKDFFRLPLYDF |
| | | DFEGEAESLRPNYDEDRNEEENKGKNKNTQKVKNAVEFNIKMA |
| | | GFAKHNRDFLKKYKEQEIKDIFMGKKKVYFTAGKHKPNEAHDN |
| | | DKIALLTKGSNKKAEKGYFKFTGPGMVNVKAGVEGEECDFHID |
| | | ESDPDVYWNMSSILPHNQIKWRPSQKKEYPRPVLKCVKDGTEY |
| | | VMLKRSEHVFAEASSEDSYPVPGKVRKQFNSISRDNVQNTDHLS |
| | | SMFQSRRLHDELSHGDLVYFRHDEKRKVTDIAYVRVSRTVDDR |
| | | PMGKRFKNESLRPCNHVCVEGCDECPDRCKELEDYFSPHPEGLC |
| | | PACHLFGTTDYKGRVSFGLGWHESNTPKWYMPEDNSQKGSHLT |
| | | LPLLERPRPTWSMPNKKSEIPGRKFYVHHPWSVDKIRNRQFDPA |
| | | KEKQPDDVIKPNENNRTVEPLGKGNEFTFEVRENNLREWELGLL |
| | | LYSLELEDNMAHKLGMGKALGMGSARIKAEAIELRCESAGQNA |
| | | ELKDKAAFVRKGFEFLEIDKPGENDPMNFDHIRQLRELLWFLPE |
| | | NVSANVRYPMLEKEDDGTPGYTDFIKQEEPSTGKRNPSYLSSEK |
| | | RRNILQTPWKHWYLIPPFQASAQSETVFEGTVKWFDDKKGFGFI |
| | | KINDGGKDVFVHHSSIVGTGFKSLNEGDSVAFKMGVGPKGPCAE |
| | | KVKKIGN |
| 13 | hreCas7- | MSVEEFYVRLTFLEPFRVVPWVRNGDERKGDRIYQRGGTYARW |
| | 11 | HKINDSHGQPYITGTMLRSAVLREIENTLTLHNTYGCCPGGTRTT |
| | | EGKLEKPLYLRRRDGFEFENHAEKPCSEEDPCPLCLIQGRFDKLR |
| | | RDEKKQFVRQGNISFCSVNFSNLNISSGIKSFSWEEIAVSRVVNRV |
| | | DPNSGKAKDFFRVWEIDHKLCPNFLGKMSISLSEKLEDVKALLA |
| | | VGLAQVNVLSGALCRVDIIDPETQKDTVHQHLIQQFVTRIQDKE |
| | | KGDAADIPAFTLPPAGLSPSSNEWNDTIKSLAEKIRKIKELEQGQ |
| | | KLRQMADVIRELRRKTPAYLDQLPAGKPEGRESIWEKTPTGETL |
| | | TLRQLLKSANVPGESWRAFCEELGEQLYRLEKNLYSHARPLPRL |
| | | LGETEFYGQPARKSDDPPMIRASYRAFPSYVWVLDGILRAETPFY |
| | | FGTETSEGQTSQAIILCPDGSYRLPRSLLRGVIRRDLRAILGTGCN |
| | | VSLGKVRPCSCPVCEIMRRITVQQGVSSYREPAEVRQRIRSNPHT |
| | | GTVEEGALFDLETGPQGMTFPFRLYFRTRSPYIDRALWLTINHW |
| | | QEGKAIFGGDIGVGMGRFRLENLQIRSADLVSRRDFSLYLRARG |
| | | LKGLSREEVTRIGLNEEQWEAVMADDPGTHYNPFPWEKISYTLL |
| | | IHSPLISNDPIAAMLDHDNKDAVMVQKTVLFVDESGNYSQMPH |
| | | HFLKGSGIRGACRFLLGRKDAPNENGLTYFEADHEECDCLLCSL |
| | | FGSKHYQGKLRFEDAELQDEVEAIKCDHVAIDRFHGGTVHRMK |
| | | YDDYPLPGSPNRPLRIKGNIWVKRDLSDTEKEAVKDVLTELRDG |
| | | LIPLGANGGAGYGRIQRLMIDDGPGWLALPERKEDERPQPSFSPV |
| | | SLGPVHVNLKSGSDTADVYYYHPHYFLEPPSQTVSRELDIISHAR |
| | | TRDSGGEALLTGRILCRLITRGPIFIPDTNNDNAFGLEGGIGHKNY |
| | | RFFRINDELAIPGSELRGMVSSVYEALTNSCFRIMEEGRYLSRRM |
| | | GADEFKDFHPGIVVDGAKIREMKRYRLPLYDTPDKTSRTKEMTC |
| | | PELFTRKDGRPERAKKFNEEIAKVAVQNRAYLLSLDEKERREVL |
| | | LGNREVTFDECPDDEYSDDEYSELKYAQKYKDFIAVLKKNGQK |
| | | RGYIKFTGPNTANKKNEDAPDKNYRSDWDPFKLNILLESDPECR |
| | | VSNIHCYPRPLLVCIKDKAEYRIHKRCEAIFCSIGSPSDLYDIPQKV |
| | | SNQYRTILQDYNDNTGKIVEIFRTQIKHDQLTTGDLVYFKPAANG |
| | | QVNAVIPVSISRKTDENPLAKRFKNDSLRPCAGLCVEDCNECPAR |
| | | CKKVADYFNPHPRGLCPACHLFGTTFYKGRVRFGFAWLTGEDG |
| | | APRWYKGPDPCDSGKGRPMTIPLLERPRPTWSIPDNSFDIPGRKF |
| | | YVHHPYSVDGIDGETRTPNNRTIEPLAEGNEFVFDIDFENLRDWE |
| | | LGLLLYSLELEDSLAHKLGLGKPLGFGTVQINIRGISLKNGSKGW |
| | | DTKTGDDKNQWIKKGFAHLGIDIKEANERPYIKQLRELLWVPTG |
| | | DNLPHVRYPELESKTKDVPGYTSLLKEKDLADRVSLLKAPWKP |
| | | WKPWSGTAPHPDKGTNRLRASIVERDRIQRKTDTAKPEKKEETK |
| | | VGKSSSSDIEKRYVGTVKWFNDKKGYGFILYGTDEEIFVHRSGV |
| | | ADNSIPKEGQKVGFRIERGARGSHAVEVKAIE |
| 14 | fmCas7- | MPRFQLSLTFFDEPFRLIEWTDKSNRNSANTQWMRGQGFARWH |
| | 11 | KITLEKGFPFVTGTAVRSKIIREVEALLSRNKGTWNGIPCCSGFFD |
| | | TKGPSPTHLRYRPTLEWEYGKTVCTSEADVCPLCLLLGRFDQAG |
| | | KKSDTPCQSTDYHVHWENLSAGVAQYRLEDIAQKRTSNRVDFF |
| | | SKKAHDHYGVWEVTAVKNLLGYIYISDAITESHQKTVISLLKAA |
| | | LSFTDTLCGANCKLELSDEPVDSIHSNQSASNFNPHSGAAPSQCS |
| | | QSMPPFNMDQETKELANTLCKAFTGNMRHLRTLADAVREMRR |
| | | MSPGISSLPRGRLNKEGEITAHYLWDERIDEKTIRQVLEDTIELSP |
| | | ARSIIYKNWISFCNQLGQKLYERAKDNDPILERKRPLGEAAFSKV |
| | | PTSSHAPRHDMNSRVKGGFTREWIIVGTLRALTPFYMGTGSQAG |
| | | KQTSMPTLQDSNDHFRLPRTALRGALRRDINQASDGMGCVVEL |
| | | GPHNLCSCPVCQVLRQIRLLDTKSKFSMPPAIRQKICKNPVLSIVN |
| | | EGSLFDVELGIEGETFPFVMRYRGGAKIPDTIITVLSWWKNERLFI |
| | | GGESGTGRGRFVLECPRIFCWDVEKGQNDYIQYHGFRNKEDELL |
| | | SVYSTVSGLAEKNDVNLNNARDFSFDKICWEVQFDGPVLTGDPL |
| | | AALFHGNTDSVFYKKPILKSGEKEPSYQWAIKSDTVRGLIRSAFG |
| | | KRDALLIKSHEDCDCLLCEAFGSKHHEGKLRFEDLTPKSDEIKTY |
| | | RMDHVAIDRISGGAVDQCKYDDEPLVGTSKHPLVFKGMFWINR |
| | | DSSVEMQRALIAAFKEIRDGLYPLGSNGGTGYGWISHLAITNGPD |
| | | WLNLEEVPLPQPTADIPVEECTAEPYPKFQKPDLDQNAVYYPHY |
| | | FLQPGKPAERERHPVSHDHIDDKLLTGRLVCTLTTKTPLIIPDTQT |
| | | NTMLPPNDAPEGHKSFRFFRIDDEVLIPGSEIRGMVSTVFEALTGS |
| | | CFRVINQKAHLSWRINADMAKHYRPGRIIQNNEKMFIQPYKMFR |
| | | LPFYAGFDPRNCLSEKQLLGIEPVKLWVKDFVASLVKPQTDIDIE |
| | | WKEKIGFVRVTGPNKVEVDSSNTPDPSLPECESDWKDIHITEDGS |
| | | TPSKNDRVYRCQLKGVTYTVAKWCEAFWVKDEGKKPITVNAE |
| | | AINRYHLIMKSYQDNPQSPPIIFRSLPVLNYKQDQKIIGSMIFYRES |
| | | AKSDKIVNEIIPVKISRTADTELLAKHLPNNDFLPCAATCLNECDT |
| | | CNAKTCKFLPLYREGYPVNGLCPSCHLFGTTGYQGRVRFGFAK |
| | | MNGNAKFCQGGERPEDRAVTLPLQERPKLTWVMPNENSTIPGR |
| | | KFFLHHQGWKKIVDEGKNPINGDVIEPDANNRTVEPLAAGNDFS |
| | | FEVFFENLREWELGLLRYTLELESELAHKLGMGKAFGFGSVKIKI |
| | | KSVDLRKQGEWEKATNTLVSEDKKSSWYNIHTVNNLRTALYYV |
| | | EDDKIQVNYPKLKKDNESDNRPGYVEMKKTAFPVRDILTTPWW |
| | | PWWPPTPPPMNQSGNQSYARSEEPARITESQPEVYKTGTVKFYK |
| | | HDKKFGFITMDGRENIHFAGNQICRPETSLQSGDKVKFIEGENYK |
| | | GPTALKVERLKG |
| 15 | smCas7- | MRLKINIHFLEPFRLIEWHEQDRRNKGNSRWQRGQSFARWHRR |
| | 11 | KDNDQGRPYITGTLLRSVVIRAVEEELARPDTAWQSCGGLFITPD |
| | | GQTKPQHLRHRATVRARQTAKDKCADRQSACPFCLLLGRFDQV |
| | | GKDGDKKGEGLRFDVRFSNLDLPKDFSPRDFDGPQEIGSRRTINR |
| | | VDDETGKAHDFFSIWEVDAVREFQGEIVLAADLPSRDQVESLLH |
| | | HALGFVDRLCGARCVISIADQKPAEREERTVAAGDEKATIADYD |
| | | QVKGLPYTRLRPLADAVRNLRQLDLAELNKPDGKFLPPGRVNK |
| | | DGRRVPHYVWDIPLGKGDTLRKRLEFLAASCEGDQAKWRNICE |
| | | SEGQALYEKSKKLKDSPAAPGRHLGAAEQVRPPQPPVSYSEESIN |
| | | SDLPLAEWIITGTLRAETPFAIGMDAPIDDDQTSSRTLVDRDGRY |
| | | RLPRSTLRGILRRDLSLASGDQGCQVRLGPERPCTCPVCLILRQV |
| | | VIADTVSETTVPADIRQRIRRNPITGTAADGGLFDTERGPKGAGF |
| | | PFSLRYRGHAPMPKALRTVLQWWSAGKCFAGSDGGVGCGRFA |
| | | LDNLEVYRWDLGTFAFRQAYSENNGLRSPEEEFDLAVIHELAEG |
| | | LAKEDGQKILKGTEPFTCWQERSWQFSFTGPLLQGDPLAALNSD |
| | | TADIISFRRTVVDNGEVLREPVLRGEGLRGLLRTAVGRVAGDDL |
| | | LTRSHQDCKCEICQLFGSEHRAGILRFEDLPPVSPTTVADKRLDH |
| | | VAIDRFDQSVVEKYDDRPLVGSPKQPLVFKGCFWVQTSGMTHQ |
| | | LTELLAQAWRDIAAGHYPVGGKGGIGYGWINSLVVDGEKITCRP |
| | | DGDSISLTTVTGDIPPRPALTPPAGAIYYPHYFLPPNPEHKPKRSD |
| | | KIIGHHTFATDPDSFTGRITCKLEVVTPLIVPDTEGEQPKDQHKNF |
| | | PFFKINDEIMLPGAPLWAAVSQVYEALTNSCFRVMKQKRFLSWR |
| | | MEAEDYKDFYPGRVLDGGKQIKKMGDKAIRMPLYDDSTATGSI |
| | | KDDQLISDCCPKSDEKLQKALATNQKIALAAKHNQEYLAQLSPD |
| | | EREEALQGLKKVSFWTESLANNEAPPFLIAKLGEERGKPKRAGY |
| | | LKITGPNNANIANTNNPDDGGYIPSWKDQFDYSFRLLGPPRCLPN |
| | | TKGNREYPRPGFTCVIDGKEYSLTKRCERIFEDISGGENQVVRAV |
| | | TERVREQYREILASYRANAAGIAEGFRTRMYDTEELRENDLVYF |
| | | KTAKQADGKERVVAISPVCISREADDRPLGKRLPAGFQPCSHVC |
| | | LEDCNTCSAKNCPVPLYREGWPVNGLCPACRLFGAQMYKGRV |
| | | NFGFARLPDDKQPETKTLTLPLLERPRPTWVLPKSVKGSNTEDA |
| | | TIPGRKFYLRHDGWRIVMAGTNPITGESIEKTANNATVEAIMPGA |
| | | TFTFDIVCENLDQQELGLLLYSLELEEGMSHTLGRGKPLGFGNV |
| | | RIKVEKIEKRLSDGSRREMIPPKGAGLFMTDKVQDALRGLTEGG |
| | | DWHQRPHISGLRRLLTRYPEIKARYPKLSQGEDKEPGYIELKSQK |
| | | DENGVPIYNPNRELRVSENGPLPWFLLAKK |
| 16 | omCas7- | MIPDLRSLVVHISFLTPYRQAPWFPPEKRRNNNRDWLRMQSYAR |
| | 11 | WHKVAPEEGHPFITGTLLRSRVIRAVEEELCLANGIWRGVACCP |
| | | GEFNSQAKKKPKHLRRRTTLQWYPEGAKSCSKQDGRENACPFC |
| | | LLLDRFGGEKSEEGRKKNNDYDVHFSNLNPFYPGSSPKVWSGPE |
| | | EIGRLRTLNRIDRLTTKAQDFFRIYEVDQVRDFFGTITLAGDLPRK |
| | | VDVEFLLRRGLGFVSTLCGAQCEIKVVDLKKKQNNKEDSILPVS |
| | | EVPFFLEPEVLAKMCQDVFPSGKLRMLADVILRLREEGPDNLTLP |
| | | MGSQGLGGRLPHHLWDVPLVSKDRETQTLRSCLEKIAAQCKSE |
| | | QTQFRLFCQKLGSSLFRINKGVYLAPNSKISPEPCLDPSKTIRTKG |
| | | PVPGKQKHRFSLLPPFEWIITGTLKAQTPFFIPDEQGSHDHTSRKI |
| | | LLTRDFYYRLPRSLLRGIIRRDLHEATDKGGCRVELAPDVPCTCQ |
| | | VCRLLGRMLLADTTSTTKVAPDMRHRVGVDRSCGIVRDGALFD |
| | | TEYGIEGVCFPLEIRYRGNKDLEGPIRQLLSWWQQGLLFLGGDF |
| | | GIGKGRFRLENMKIHRWDLRDESARADYVQKCGLRRGVGDDT |
| | | AINLEKDLSLNLPESGYPWKKHAWKLSFQVPLLTADPIMAQTRH |
| | | EEDSVYFQKRIFTSDGRVVLVPALRGEGLRGLLRTAVSRAYGISL |
| | | INDEHEDCDCPLCKIFGNEHHAGMLRFDDMVPVGTWNDKKIDH |
| | | VSCSRFDASVVNKFDDRSLVGSPDSPLHFEGTFWLHRDFQNDVE |
| | | IKTALQDFADGLYSIGGKGGIGYGWLFDMEIPRSLRKLNSGFREA |
| | | SSIQDALLDSAKEIPLSAPLTFTPVKGAVYNPYYYLPFPAEKPERC |
| | | LVPPSHARLQSDRYTGCLTCELETVSPLLLPDTCREKDGNYKEYP |
| | | SFRLNNTPMIPGAGLRAAVSQVYEVLTNSCIRIMDQGQTLSWRM |
| | | STSEHKDYQPGKITDNGRKIQPMGKQAIRLPLYDEVIHHVSTPGD |
| | | TDDLEKLKAIVLELTRPWKELPEEQKKKRFEKCKNILDGRMLQQ |
| | | KELRALENSGFAYWRDKTSLTFDSFLKDAIEQEYPRYSGDYQRI |
| | | KALVVNITLPWKLLKKEERHKRFDKCRRILKGQQPLTKDERKAL |
| | | EESGFANWHGRELLFDRFLKDENSCLIKAETTDRVIASVAKNNR |
| | | DYLFEIKQQDFARYKRIIQGLERVPFSLRSLAKSKETSFQIACLGL |
| | | RRGRFLRKGYLKISGPNNANVEISGGSHSNSGYSDIWDDPLDFSF |
| | | RLSGKSELRPNTQKTREYPRPSFTCTVDGKQYTVNKRCERVFED |
| | | SAAPAIELPRMVREGYKGILTDYEQNAKHIPQGFQTRFSSYRELN |
| | | DGDLVYYKTDSQGRVTDLAPVCLSRLADDRPLGKRLPEEYRPC |
| | | AHVCLEECDPCTGKDCPVPIYREGYPARGFCPACQLFGTQMYKG |
| | | RVRFSFGVPVNSTRSPQLKYVTLPSQERPRPTWVLPESCKGKEK |
| | | DVPGRKFYLRHDGWREMWGDDDKPDSRPSSEECQDIIEGIGPGE |
| | | KFHFRVAFENLDKNELGRLLYSLELDAGMNHHLGRGKAFGFGQ |
| | | VKIRVTKLERRLEPGQWRSEKICTDLPVTSSELVISSLKKVEERRK |
| | | LLRLVMTPYKGLTACYPGLERENGRPGYTDLKMLATYDPYREL |
| | | VVQIGSNQPLRPWYEPGKSFKPSPGNDCTGRGGSVSKSLISEPKV |
| | | VPAIAPFCEGVVKWFNSVKGFGFIETKEQRDIFVHFSAIRGEGYKI |
| | | LEPGEKVRFEIGEGRKGPQAINVIRIR |
| 17 | SybCas7- | MFPKGRQMRRQRLLGDAEYYGGTGREQPASIVISTDSDPDHKV |
| | 11 | YEWIITGQLKAETGFFFGTKAGAGGHTDLSILLGKDGHYRVPRS |
| | | VFRGALRRDLRVAFGAGCRVEVGRERPCECPVCKVMRQITVMD |
| | | TISSYREAPEIRQRIRLNPYTGTVDKGALFDMEVGPEGIEFPFVLR |
| | | FRGSKSFPSELAAVIGSWTKGTAWLGGAAATGKGRFSLLGLSIH |
| | | KWNLSTAEGRKSYLAAYGLRDAADKTVKRLSIDKGGKGDVGLP |
| | | AGLERDALPSSVREPLWKKLVCTVDFSSPLLLADPIAALLGVEG |
| | | DERIGFDNIAYEKRRYNGETNTTESIPAVKGETFRGIVRTALGKR |
| | | HGNLTRDHEDCRCRLCAVFGKEQEAGKIRFEDLMPVGAWTRKH |
| | | LDHVAIDRFHGGAEENMKFDTYALAASPTNPLRMKGLIWVRSD |
| | | LFETGHDGPTPPYVKDIIDALADVKRGLYPVGGKTGSGYGWIKD |
| | | VTIDGLPQGLSLPPAEERVDGVNEVPPYNYSAPPDLPSAAEGEYF |
| | | FPHVFIKPYDKVDRVSRLTGHDRFRQGRITGRITCTLKTLTPLIIPD |
| | | SEGIQTDATGHKMCKFFSVAGKPMIPGSEIRGMISSVYEALTNSC |
| | | FRVFDEEKYLTRRVQPKKGAKSSELVPGIIVWGQNGGLAVQQV |
| | | KNAYRVPLYDDPAVTSAIPTEAQKNKERWESVPSVNLQGALDW |
| | | NLTTANIARDNRTFLNSRPEEKDAILSGTKPISFELEGTNPNDMLV |
| | | RLVPDGVDGAHSGYLKFTGLNMVLKANKKTSRKLAPSEEDVRT |
| | | LAILHNDFDSRRDWRRPPNSQRYFPRSVLRFSLERSTYTIPKRCER |
| | | VFEGTCGEPYSVPSDVERQYNSIIDDISKNYGRISETYLTKTANRK |
| | | LTVGDLVYFIADLDKNMATHILPVFISRISDEKPLGELLPFSGKLIP |
| | | CEGEPPTILKKMAPSLLTEAWRTLISTHLEGFCPACRLFGTTSYK |
| | | GRIRFGFAEHTGTPKWLREELDWARPFLTLPIQERPRPTWSVPDD |
| | | KSEVPGRKFYLHHHGGNRIVESNLRNRPEVNQTKNNSSVEPISA |
| | | GNTFTFDVCFENLEAWELGLLLYCLELSPKLAHKLGRAKAFGFG |
| | | SVKIHVERIEERTTDGAYQDVTAVKKNGWITTGHDKLREWFHR |
| | | DDWEDVDHIRNLRTVLRFPDADQEHDVRYPELKANNGVSGYVE |
| | | LRDKMTASERQESLRTPWYRWFPQNGTGGSGRHEQAATSQEQD |
| | | TAKDESVLSATQRRQAVIDVSDPDERLSGTVESFDRQKGDGYIG |
| | | CGVRQFYVRLEDIRSRTALCEGQVVTFRARKEWEGHEAYDVEID |
| | | Q |
| 18 | gwCas7- | MTKKPGTEDKATLWGKESASKSVKTILEESIQGFTVEQKRSFFA |
| | 11 | NLADQLVSRAGEQGAKSVRSQGLIIGRKENYAKPSAQEPTRHHL |
| | | YRQPSNASAFLATGWLIAETPFFIGSGTEGQKQTDDQAESLHLRT |
| | | LRDGHGRFRIPFTTIRGVMDKELRDILQAGCAKGRSLRAPCPCQV |
| | | CTLMRRIQVRDAIAADILPPDLRMRTRIDPSHGTVAHLFSLEMAP |
| | | QGLKLPFFLKLKGVETIDPDKELLEILNDWSAGQCFLGGLWGTG |
| | | KGRFRLDDLQWHRLELDNADYYTPLLQDRFFAGETISDLRQGLQ |
| | | SINIQPERIPAQTPSRNMPYCRVDCILEFKSPVLSGDPVAALFESD |
| | | APDNVAYKKPVVQYDETGRLRTTDPGPVEMLTCLKGEGVRGV |
| | | VAYLAGKAYDQHDLSHDSCNCTFCQAFGNGQKAGSLRFDDFM |
| | | PVQFESDQAGNFSWSPHTPHAMRSDRVALDVFGGAMPEAKFDD |
| | | RPLAASPGKPLNFKSTIWYREDMGKEAGKALKRALIDLQNNMA |
| | | AIGSGGGIGRGWVSRVCFEGDIPDFLEDFPEPITVTEPEQDSQLLK |
| | | NQAVADETAVSACDTADAPHPLAVTLEPGARYFPRVIIPRAPTV |
| | | KRDECVTGQRYHTGRLSGKIFCELNTLGPLFVPDTDYSAGVPVPI |
| | | SDEQLAECQLQAVFENTSKFNEFFATYPEETVTKLKDLLCAADD |
| | | KWILAVKDITADLRQEIGEDTFQRIIRKAGHKTQRFHQINDEIGLP |
| | | GASLRGMVLSNYQILTNSCYRNLKATEEITRRMPADEAKYRKA |
| | | GRVTVSGDGAQKKYSIQEMEVLRLPIYDNMNTPDNMPDVAKQA |
| | | TTAKRCNNLMNEAAKTSRVELKARWREGQSKIKYQIIDALNKV |
| | | DPIIQVISSSKQINPNNGKTGWGYVKYTGANVFAKSLVAPIDCLR |
| | | KKDAGHVCCQVNLNPAWEASNFDILINEKCPVERQSGPRPTLRC |
| | | KGQDSAWYTLTKRSERIFTDKKPVPDPINIPPREVKRYNELRDSY |
| | | KKNTAHVPKPLQTFFNQESLANGDLVYFEVNQFGEASQLTPVSIS |
| | | RTTDLFPIGGRLPQGHKDLFPCTAMCLSECKNCVPASFCEFHSRS |
| | | HEKLCPACSLAGTTGNRGRIKFSEAWLSGLPKWHSVSQDNVGR |
| | | GLGVTMPRLERSRRTWHLPTKDAYLLGQSIYLNHPVPAILPSDQ |
| | | VPSENNQTVEPLGPKNIFSFQLAFDNLSIEELGLLLYSLELESGMA |
| | | HRLGRGRALGMGSVQISVKDIQIRDNKSFLFSSNISKKSEWIQCG |
| | | KDEFAQEAWFGESWDNIDHIQRLRQALTIPVKGDVGCIRYPKLE |
| | | AEGGMPDYIKLRKRLTPLCDREEPVRYRINPVQLARMILPFVPW |
| | | HGACPALLNEQVMIEAKRLTELXXXDRANWPC |

[0233] Table 2 below shows Cas7-11 guide sequences for trans-splicing.

TABLE 2

| SEQ | | |
|---|---|---|
| ID | | |
| NO | ID | Sequence |
| 19 | COL7A1_intron_ | GTTGATGTCACGGAACGGCCGTGGCCAGCAACTTCGCGG |
| | 4_6_1 | TGAGTGAC |
| 20 | COL7A1_intron_ | GTTGATGTCACGGAACGTGAGTGACGGGAGGATGGCGC |
| | 4_6_2 | TCTGAGCAC |
| 21 | COL7A1_intron_ | GTTGATGTCACGGAACTCTGAGCACAGCACAGCCCTTGA |
| | 4_6_3 | GCAGTGAC |
| 22 | COL7A1_intron_ | GTTGATGTCACGGAACAGCAGTGACCCTCCTATAGAACA |
| | 4_6_4 | CTATCTGG |
| 23 | COL7A1_intron_ | GTTGATGTCACGGAACACTATCTGGGCTGTGATTCCACA |
| | 4_6_5 | GTGCTGGG |
| 24 | COL7A1_intron_ | GTTGATGTCACGGAACAGTGCTGGGCCCGTGAGCAGGCT |
| | 4_6_6 | GGGAGCTC |
| 25 | COL7A1_intron_ | GTTGATGTCACGGAACTGGGAGCTCTGCGGCTCTCCTTC |
| | 4_6_7 | TGCTAGAA |
| 26 | COL7A1_intron_ | GTTGATGTCACGGAACCTGCTAGAACCTGCCCCCAGACT |
| | 4_6_8 | CTTGGCTA |
| 27 | COL7A1_intron_ | GTTGATGTCACGGAACTCTTGGCTATGATCCTGTGACCC |
| | 4_6_9 | CAAGACCG |
| 28 | COL7A1_intron_ | GTTGATGTCACGGAACCCAAGACCGCCATGCAGGTCATG |
| | 4_6_10 | AGCTCTTT |
| 29 | COL7A1_intron_ | GTTGATGTCACGGAACGAGCTCTTTGTGTCAGTCCATTTT |
| | 4_6_11 | GTATAAC |
| 30 | COL7A1_intron_ | GTTGATGTCACGGAACTTGTATAACCCCTTCCCTGCTGTC |
| | 4_6_12 | AGCGGTG |
| 31 | COL7A1_intron_ | GTTGATGTCACGGAACTCAGCGGTGACTCTGTGACTTCT |
| | 4_6_13 | GGGCGGGG |
| 32 | COL7A1_intron_ | GTTGATGTCACGGAACTGGGCGGGGACTGAGCTGTATGA |
| | 4_6_14 | CTTCCAAT |
| 33 | COL7A1_intron_ | GTTGATGTCACGGAACACTTCCAATTCCATGTGACCTCC |
| | 4_6_15 | ATTCCAAT |
| 34 | COL7A1_intron_ | GTTGATGTCACGGAACCATTCCAATGAAGACTTTGATCA |
| | 4_6_16 | TACAACCC |
| 35 | COL7A1_intron_ | GTTGATGTCACGGAACATACAACCCCAAGGCAGGGCCA |
| | 4_6_17 | AGCTGTATC |
| 36 | COL7A1_intron_ | GTTGATGTCACGGAACAGCTGTATCTGTCCTGTTTGTTTT |
| | 4_6_18 | CAGGGCA |
| 37 | COL7A1_intron_ | GTTGATGTCACGGAACTTCAGGGCAGTGGAGAGGGCAG |
| | 4_6_19 | AGGAAGTCT |
| 38 | COL7A1_intron_ | GTTGATGTCACGGAACAGGAAGTCTGCTAACATGCGGTG |
| | 4_6_20 | ACGTCGAG |
| 39 | COL7A1_intron_ | GTTGATGTCACGGAACGACGTCGAGGAGAATCCTGGCCC |
| | 4_6_21 | AATGCCCG |
| 40 | COL7A1_intron_ | GTTGATGTCACGGAACCAATGCCCGCCATGAAGATCGAG |
| | 4_6_22 | TGCCGCAT |
| 41 | COL7A1_intron_ | GTTGATGTCACGGAACGAAACCTCCCCTTGCCCCATACC |
| | 4_8_1 | AGGCTTAC |
| 42 | COL7A1_intron_ | GTTGATGTCACGGAACAGGCCCTATGACCTAGACCTCAA |
| | 4_8_2 | CCCTGTAG |
| 43 | COL7A1_intron_ | GTTGATGTCACGGAACAAGTCCTGTGACCCCCCAAGTCC |
| | 4_8_3 | CATAGATA |
| 44 | COL7A1_intron_ | GTTGATGTCACGGAACCCCAGGCTCCAGTTAACCCCCTG |
| | 4_8_4 | ACCCAGCA |
| 45 | COL7A1_intron_ | GTTGATGTCACGGAACCTGGAGGTGACAAAGACCATCA |
| | 4_8_5 | GTGCTAGTC |
| 46 | ANXA4_3TS_1 | GTTGATGTCACGGAACcagatagaaagtaccctcaatttatcatcaa |
| 47 | B4GALNT1_3TS_1 | GTTGATGTCACGGAACtagggctggccgttcctggccgcagegcccc |
| 48 | KRAS_3TS_1 | GTTGATGTCACGGAACctttttaaacagaaaccttgtatctctctca |
| 49 | MALAT_3TS_1 | GTTGATGTCACGGAACgttaaacaatggaaaagtatttctcctacac |
| 50 | NF2_3TS_1 | GTTGATGTCACGGAACtattggaggagcaactcagaaagctgcatga |
| 51 | PPARG_3TS_1 | GTTGATGTCACGGAACgtaatcacaggcaagttataacatctctaag |
| 52 | PPIA_3TS_1 | GTTGATGTCACGGAACtcccaaatgaagggagcaacccaaataaaat |
| 53 | RPS5_3TS_1 | GTTGATGTCACGGAACtgtccagacacacacacacacaggctgaagt |
| 54 | SMARCA1_3TS_1 | GTTGATGTCACGGAACtttggcaatgatacaagtaaatctgacccat |
| 55 | STAT3_3TS_1 | GTTGATGTCACGGAACtggctcacgcctgtaatgccagcactttgag |
| 56 | TERT_3TS_1 | GTTGATGTCACGGAACgacccctggctcaggactggggtgcaaggca |
| 57 | TUG1_3TS_1 | GTTGATGTCACGGAACaaaaaagaaaacacaaaagtctgattaacac |
| 58 | ANXA4_3TS_2 | GTTGATGTCACGGAACatgtttcatgaacataggcgatgctctatgt |
| 59 | B4GALNT1_3TS_2 | GTTGATGTCACGGAACcagttcccaggccccacttcgtggttctctc |
| 60 | KRAS_3TS_2 | GTTGATGTCACGGAACttccttccttcttctactaagttattttgtt |
| 61 | MALAT_3TS_2 | GTTGATGTCACGGAACcaaaatttttgaagcataccttaacatcttg |
| 62 | NF2_3TS_2 | GTTGATGTCACGGAACgtcacacagagagagggcgtgtaaataaggc |
| 63 | PPARG_3TS_2 | GTTGATGTCACGGAACaaaaaacactggagttaaggcaagaaaaaga |
| 64 | PPIA_3TS_2 | GTTGATGTCACGGAACcagttcagatatgtgtatcctgaaatattct |
| 65 | RPS5_3TS_2 | GTTGATGTCACGGAACgcctgatttgcaatcagatagagggtcacaa |
| 66 | SMARCA1_3TS_2 | GTTGATGTCACGGAACagatacttttttgtactgttatattttagag |
| 67 | STAT3_3TS_2 | GTTGATGTCACGGAACgtatccccaagagaaggctccctgttggcca |
| 68 | TERT_3TS_2 | GTTGATGTCACGGAACggggggctgtgtcccctctctgagcctcag |
| 69 | TUG1_3TS_2 | GTTGATGTCACGGAACaaagacaaatgataaatgaaaacaaacaaca |
| 70 | ANXA4_3TS_3 | GTTGATGTCACGGAACatcaatatttgctttgccagggaaattttag |
| 71 | B4GALNT1_3TS_3 | GTTGATGTCACGGAACgccccatcctcttccgcttcacccctgcagg |
| 72 | KRAS_3TS_3 | GTTGATGTCACGGAACgaaaacaatgtaattcctagtttccactaca |
| 73 | MALAT_3TS_3 | GTTGATGTCACGGAACacaatttacaaacagataagtttaaaataaa |
| 74 | NF2_3TS_3 | GTTGATGTCACGGAACagtaaagctatttttaaaaagctacacccag |
| 75 | PPARG_3TS_3 | GTTGATGTCACGGAACatttgtattgtttcagtgtaaaagcacagtg |
| 76 | PPIA_3TS_3 | GTTGATGTCACGGAACgaatagaagggttaaatagaaccgaaatggt |
| 77 | RPS5_3TS_3 | GTTGATGTCACGGAACacccataggcccactgagacaagaggtggtg |
| 78 | SMARCA1_3TS_3 | GTTGATGTCACGGAACaaatacaataaaatccatttatatggctggg |
| 79 | STAT3_3TS_3 | GTTGATGTCACGGAACcaaaacctcaaaaaagatacatgcaggacct |
| 80 | TERT_3TS_3 | GTTGATGTCACGGAACtctctctctgacccccaccactccagacccc |
| 81 | TUG1_3TS_3 | GTTGATGTCACGGAACcctgatggctgttaattcttgatgagcctgg |
| 82 | ANXA4_3TS_4 | GTTGATGTCACGGAACaagaaaagtgacagttgtttcctctgtttct |
| 83 | B4GALNT1_3TS_4 | GTTGATGTCACGGAACgtcaaggtctgcgctccggtgccttcggggg |
| 84 | KRAS_3TS_4 | GTTGATGTCACGGAACaacctgtccacaacttttgtcataaaatttg |
| 85 | MALAT_3TS_4 | GTTGATGTCACGGAACagacattcaagctgaactatcacaattctta |
| 86 | NF2_3TS_4 | GTTGATGTCACGGAACtttgccacttttataattatgcatcattttt |
| 87 | PPARG_3TS_4 | GTTGATGTCACGGAACgcaacagggcaagccaccatagtacaccttc |
| 88 | PPIA_3TS_4 | GTTGATGTCACGGAACaatctgcaaggttcaaactttaaacccaagt |
| 89 | RPS5_3TS_4 | GTTGATGTCACGGAACtggggccactcccaactgatgctgccagcca |
| 90 | SMARCA1_3TS_4 | GTTGATGTCACGGAACtacttatcttttactatttctgtgatatatg |
| 91 | STAT3_3TS_4 | GTTGATGTCACGGAACagaaaatataaagtttctgaggagaattcaa |
| 92 | TERT_3TS_4 | GTTGATGTCACGGAACcctctgccctcagggcctggcctggcggtgt |
| 93 | TUG1_3TS_4 | GTTGATGTCACGGAACcaggactctaagtgggtctgctgtcagcaca |
| 94 | ANXA4_3TS_5 | GTTGATGTCACGGAACagaagaaatgaaaagattacagataagaccc |
| 95 | B4GALNT1_3TS_5 | GTTGATGTCACGGAACttgcctccaggcgggcctgggataggggacc |
| 96 | KRAS_3TS_5 | GTTGATGTCACGGAACgttatagcacagtcattagtaacacaaatat |
| 97 | MALAT_3TS_5 | GTTGATGTCACGGAACgtttcccctccctcatcaacaaaagcccacc |
| 98 | NF2_3TS_5 | GTTGATGTCACGGAACaaaataaaaaacctacacatgaagtaaattt |
| 99 | PPARG_3TS_5 | GTTGATGTCACGGAACtgagaggataattatcccatgaaaacagtcc |
| 100 | PPIA_3TS_5 | GTTGATGTCACGGAACaaatgtcacttctgacaacataaccatgaag |
| 101 | RPS5_3TS_5 | GTTGATGTCACGGAACgtcaggctagaaggacagactgcggtcctcc |
| 102 | SMARCA1_3TS_5 | GTTGATGTCACGGAACgtattatatatacttcttttcagtacatgaa |
| 103 | STAT3_3TS_5 | GTTGATGTCACGGAACacaaaaaaacagaagtaaagaaagatttcct |
| 104 | TERT_3TS_5 | GTTGATGTCACGGAACaggagactgacagtggccacgcagaaactca |
| 105 | TUG1_3TS_5 | GTTGATGTCACGGAACaaaacaggtaaaataacaaatgcatggaatt |

[0234] Table 3 below shows trans-splicing cargo template sequences for human endogenous targets.

TABLE 3

| SEQ | | |
|---|---|---|
| ID | | |
| NO | ID | Sequence |
| 106 | ANXA4 | ctgtcaaagaaaaaaaaagaagaaatgaaaagattacagataagacccatgaaaaaagaaaagtgacag |
| | 3prime | ttgtttcctctgtttctacaaggtatcaatatttgctttgccagggaaattttagccaagcaatgtttcatgaaca |
| | cargo_1 | taggcaacgaggaattctcttcttttttttctgcagtaaaAtgcatgaggaacaaatctgcatattttgctgaa |
| | | aagctctataaatcgGACTACAAAGACGATGACGACAAGTAA |
| 107 | ANXA4 | gaaaaaagaaaagtgacagttgtttcctctgtttctacaaggtatcaatatttgctttgccagggaaattttagc |
| | 3prime | caagcaatgtttcatgaacataggcgatgctctatgtattttcacagatagaaagtaccctcaatttatcatca |
| | cargo_2 | aaacgaggaattctcttcttttttttctgcagtaaaAtgcatgaggaacaaatctgcatattttgctgaaaagc |
| | | tctataaatcgGACTACAAAGACGATGACGACAAGTAA |
| 108 | ANXA4 | tttgctttgccagggaaattttagccaagcaatgtttcatgaacataggcgatgctctatgtattttcacagata |
| | 3prime | gaaagtaccctcaatttatcatcaagttcctggagaagtaattgataaagtctatcaaagcaaagggtggta |
| | cargo_3 | tttaacgaggaattctcttcttttttttctgcagtaaaAtgcatgaggaacaaatctgcatattttgctgaaaag |
| | | ctctataaatcgGACTACAAAGACGATGACGACAAGTAA |
| 109 | B4GAL | ctgcagggagagggaggttgcctccaggcgggcctgggataggggacccgaaggggtcaaggtctgc |
| | NT1 | gctccggtgccttcgggggtacccctgccccatcctcttccgcttcacccctgcaggacccagacagttc |
| | 3prime | ccaggccccacttaacgaggaattctcttcttttttttctgcaggtCgggggcgcggtgcgcgagatctcc |
| | cargo_1 | ggctttgccaccacttatGACTACAAAGACGATGACGACAAGTAA |
| 110 | B4GAL | aaggggtcaaggtctgcgctccggtgccttcgggggtacccctgccccatcctcttccgcttcacccctgc |
| | NT1 | aggacccagacagttcccaggccccacttcgtggttctctctttgtcctagggctggccgttcctggccgc |
| | 3prime | agcgccccaacgaggaattctcttcttttttttctgcaggtCgggggcgcggtgcgcgagatctccggctt |
| | cargo_2 | tgccaccacttatGACTACAAAGACGATGACGACAAGTAA |
| 111 | B4GAL | cctcttccgcttcacccctgcaggacccagacagttcccaggccccacttcgtggttctctctttgtcctagg |
| | NT1 | gctggccgttcctggccgcagcgcccccgctgtggccttagcctgttcaaggcccttctccacccccaca |
| | 3prime | tcctgcaaacgaggaattctcttcttttttttctgcaggtCgggggcgcggtgcgcgagatctccggctttg |
| | cargo_3 | ccaccacttatGACTACAAAGACGATGACGACAAGTAA |
| 112 | KRAS | ctgggaaagaaaaaaaagttatagcacagtcattagtaacacaaatatctttcaaaacctgtccacaactttt |
| | 3prime | gtcataaaatttggctgaaagaaaacaatgtaattcctagtttccactacaccaaattttccttccttcttctact |
| | cargo_1 | aaacgaggaattctcttcttttttttctgcagagaGcaaattaaaagagttaaggactctgaagatgtaccta |
| | | tggtcctagtaggaaataaatgtGACTACAAAGACGATGACGACAAGTAA |
| 113 | KRAS | tttcaaaacctgtccacaacttttgtcataaaatttggctgaaagaaaacaatgtaattcctagtttccactaca |
| | 3prime | ccaaattttccttccttcttctactagttattttgtttctttacctttttaaacagaaaccttgtatctctctcaaacg |
| | cargo_2 | aggaattctcttcttttttttctgcagagaGcaaattaaaagagttaaggactctgaagatgtacctatggtc |
| | | ctagtaggaaataaatgtGACTACAAAGACGATGACGACAAGTAA |
| 114 | KRAS | aatgtaattcctagtttccactacaccaaattttccttccttcttctactagttattttgtttctttacctttttaaacag |
| | 3prime | aaaccttgtatctctctcaaaagatcaaatacctagaagtatagtaaaactataacctaataggttaataacg |
| | cargo_3 | aggaattctcttcttttttttctgcagagaGcaaattaaaagagttaaggactctgaagatgtacctatggtc |
| | | ctagtaggaaataaatgtGACTACAAAGACGATGACGACAAGTAA |
| 115 | MALAT | ctatagaaaaaaaaaaagtttcccctccctcatcaacaaaagcccaccctctaagagacattcaagctgaa |
| | 3prime | ctatcacaattcttaatcagttacaatttacaaacagataagtttaaaataaacaatttacaaaatttttgaagc |
| | cargo_1 | atacaacgaggaattctcttcttttttttctgcagacAtttttcagataacatcttctgagtcataaccagcctg |
| | | gcagtatgatggcctaGACTACAAAGACGATGACGACAAGTAA |
| 116 | MALAT | ctaagagacattcaagctgaactatcacaattcttaatcagttacaatttacaaacagataagtttaaaataaa |
| | 3prime | caatttacaaaatttttgaagcataccttaacatcttgttttgcagttaaacaatggaaaagtatttctcctacac |
| | cargo_2 | aacgaggaattctcttcttttttttctgcagacAtttttcagataacatcttctgagtcataaccagcctggca |
| | | gtatgatggcctaGACTACAAAGACGATGACGACAAGTAA |
| 117 | MALAT | acaatttacaaacagataagtttaaaataaacaatttacaaaatttttgaagcataccttaacatcttgttttgca |
| | 3prime | gttaaacaatggaaaagtatttctcctacactaaaaaaaaacttgcttacacacaactgaaaatagaatctta |
| | cargo_3 | caacgaggaattctcttcttttttttctgcagacAtttttcagataacatcttctgagtcataaccagcctggca |
| | | gtatgatggcctaGACTACAAAGACGATGACGACAAGTAA |
| 118 | NF2 | ctaccaaaaaatagagcaaaataaaaaacctacacatgaagtaaatttggtattgtttgccacttttataattat |
| | 3prime | gcatcatttttacaaaacagtaaagctatttttaaaaagctacacccagggagatagtcacacagagagag |
| | cargo_1 | ggcgaacgaggaattctcttcttttttttctgcaggtGataaatctgtatcagatgactccggaaatgtggg |
| | | aggagagaattactgcttggGACTACAAAGACGATGACGACAAGTAA |
| 119 | NF2 | tattgtttgccacttttataattatgcatcatttttacaaaacagtaaagctatttttaaaaagctacacccaggga |
| | 3prime | gatagtcacacagagagagggcgtgtaaataaggcaccattctattggaggagcaactcagaaagctg |
| | cargo_2 | catgaaacgaggaattctcttcttttttttctgcaggtGataaatctgtatcagatgactccggaaatgtggg |
| | | aggagagaattactgcttggGACTACAAAGACGATGACGACAAGTAA |
| 120 | NF2 | ctatttttaaaaagctacacccagggagatagtcacacagagagagggcgtgtaaataaggcaccattcta |
| | 3prime | ttggaggagcaactcagaaagctgcatgataactcagacctaggtgcaaccctcatctggcagtgcccct |
| | cargo_3 | gtccctgccaacgaggaattctcttcttttttttctgcaggtGataaatctgtatcagatgactccggaaatgt |
| | | gggaggagagaattactgcttggGACTACAAAGACGATGACGACAAGTAA |
| 121 | PPARG | ctgtgtatggagacatgtgagaggataattatcccatgaaaacagtcctaaaaaggcaacagggcaagcc |
| | 3prime | accatagtacaccttcatgctgtatttgtattgtttcagtgtaaaagcacagtggaacatgaaaaaacactgg |
| | cargo_1 | agttaagaacgaggaattctcttcttttttttctgcaggtgcTatcaaagtggagcctgcatctccaccttatt |
| | | attctgagaagactcagctctacaataagGACTACAAAGACGATGACGACAAGT |
| | | AA |
| 122 | PPARG | aaaaggcaacagggcaagccaccatagtacaccttcatgctgtatttgtattgtttcagtgtaaaagcacag |
| | 3prime | tggaacatgaaaaaacactggagttaaggcaagaaaaagaaaggtttgtaatcacaggcaagttataac |
| | cargo_2 | atctctaagaacgaggaattctcttcttttttttctgcaggtgcTatcaaagtggagcctgcatctccacctta |
| | | ttattctgagaagactcagctctacaataagGACTACAAAGACGATGACGACAAG |
| | | TAA |
| 123 | PPARG | ttgtttcagtgtaaaagcacagtggaacatgaaaaaacactggagttaaggcaagaaaaagaaaggtttgt |
| | 3prime | aatcacaggcaagttataacatctctaagcctcacctgtaaatataaaatgggaatgagaattaagtctgtg |
| | cargo_3 | gttctataacgaggaattctcttcttttttttctgcaggtgcTatcaaagtggagcctgcatctccaccttatta |
| | | ttctgagaagactcagctctacaataagGACTACAAAGACGATGACGACAAGT |
| | | AA |
| 124 | PPIA | ctgtcaacatataggaaaaatgtcacttctgacaacataaccatgaagtgtgccaaatctgcaaggttcaaa |
| | 3prime | ctttaaacccaagttcaaactgaatagaagggttaaatagaaccgaaatggtagagtaacagttcagatat |
| | cargo_1 | gtgtatcaacgaggaattctcttcttttttttctgcagggAggtgacttcacacgccataatggcactggtg |
| | | gcaagtccatctatggggagaaatttGACTACAAAGACGATGACGACAAGTAA |
| 125 | PPIA | tgccaaatctgcaaggttcaaactttaaacccaagttcaaactgaatagaagggttaaatagaaccgaaatg |
| | 3prime | gtagagtaacagttcagatatgtgtatcctgaaatattctggctcaatcccaaatgaagggagcaacccaa |
| | cargo_2 | ataaaataacgaggaattctcttcttttttttctgcagggAggtgacttcacacgccataatggcactggtg |
| | | gcaagtccatctatggggagaaatttGACTACAAAGACGATGACGACAAGTAA |
| 126 | PPIA | actttaaacccaagttcaaactgaatagaagggttaaatagaaccgaaatggtagagtaacagttcagatat |
| | 3prime | gtgtatcctgaaatattctggctcaatcccaaatgaagggagcaacccaaataaaataaaattcagtaaatt |
| | cargo_3 | tcgtacaacgaggaattctcttcttttttttctgcagggAggtgacttcacacgccataatggcactggtgg |
| | | caagtccatctatggggagaaatttGACTACAAAGACGATGACGACAAGTAA |
| 127 | RPS5 | ctaggaagacagcaggggtcaggctagaaggacagactgcggtcctccagcaccctggggccactcc |
| | 3prime | caactgatgctgccagccacgttgtcacccataggcccactgagacaagaggtggtggcatcatgcctg |
| | cargo_1 | atttgcaatcagataacgaggaattctcttcttttttttctgcaggcGatctggctgctgtgcacaggcgctc |
| | | gtgaggctgccttccggaacattaagaccGACTACAAAGACGATGACGACAAG |
| | | TAA |
| 128 | RPS5 | caccctggggccactcccaactgatgctgccagccacgttgtcacccataggcccactgagacaagagg |
| | 3prime | tggtggcatcatgcctgatttgcaatcagatagagggtcacaagagcaagtgtccagacacacacacac |
| | cargo_2 | acaggctgaagtaacgaggaattctcttcttttttttctgcaggcGatctggctgctgtgcacaggcgctcg |
| | | tgaggctgccttccggaacattaagaccGACTACAAAGACGATGACGACAAGT |
| | | AA |
| 129 | RPS5 | ggcccactgagacaagaggtggtggcatcatgcctgatttgcaatcagatagagggtcacaagagcaag |
| | 3prime | tgtccagacacacacacacacaggctgaagttgcgtccccagtgacaggagattgagacctgcctcaac |
| | cargo_3 | agcaaactgctaaacgaggaattctcttcttttttttctgcaggcGatctggctgctgtgcacaggcgctcg |
| | | tgaggctgccttccggaacattaagaccGACTACAAAGACGATGACGACAAGT |
| | | AA |
| 130 | SMARCA1 | ctatgagggaggaaaatgtattatatatacttcttttcagtacatgaagtaaacttacttatcttttactatttctgt |
| | 3prime | gatatatggaacaataaatacaataaaatccatttatatggctgggccaaatcagatacttttttgtactgtaa |
| | cargo_1 | cgaggaattctcttcttttttttctgcaggcAccacggcctccaaaacagccaaatgttcaggattttcaattt |
| | | ttcccaccacgcttaGACTACAAAGACGATGACGACAAGTAA |
| 131 | SMARCA1 | aaacttacttatcttttactatttctgtgatatatggaacaataaatacaataaaatccatttatatggctgggcca |
| | 3prime | aatcagatacttttttgtactgttatattttagagactatgatttggcaatgatacaagtaaatctgacccataac |
| | cargo 2 | gaggaattctcttcttttttttctgcaggcAccacggcctccaaaacagccaaatgttcaggattttcaatttt |
| | | tcccaccacgcttaGACTACAAAGACGATGACGACAAGTAA |
| 132 | SMARCA1 | ataaaatccatttatatggctgggccaaatcagatacttttttgtactgttatattttagagactatgatttggcaa |
| | 3prime | tgatacaagtaaatctgacccatagatcatgttgcaacagaaatctactttaggacataaaaactggccttg |
| | cargo_3 | taacgaggaattctcttcttttttttctgcaggcAccacggcctccaaaacagccaaatgttcaggattttca |
| | | atttttcccaccacgcttaGACTACAAAGACGATGACGACAAGTAA |
| 133 | STAT3 | ctgtttaaaataagcaaacaaaaaaacagaagtaaagaaagatttccttgggaacagaaaatataaagtttc |
| | 3prime | tgaggagaattcaaatgaagccaaaacctcaaaaaagatacatgcaggacctgcaggcagtatcccca |
| | cargo_1 | agagaaggctaacgaggaattctcttcttttttttctgcaggaCctagaacagaaaatgaaagtggtagag |
| | | aatctccaggatgactttgatttcaactatGACTACAAAGACGATGACGACAAGT |
| | | AA |
| 134 | STAT3 | ggaacagaaaatataaagtttctgaggagaattcaaatgaagccaaaacctcaaaaaagatacatgcagg |
| | 3prime | acctgcaggcagtatccccaagagaaggctccctgttggccaggtgcagtggctcacgcctgtaatgcc |
| | cargo_2 | agcactttgagaacgaggaattctcttcttttttttctgcaggaCctagaacagaaaatgaaagtggtagag |
| | | aatctccaggatgactttgatttcaactatGACTACAAAGACGATGACGACAAGT |
| | | AA |
| 135 | STAT3 | tcaaaaaagatacatgcaggacctgcaggcagtatccccaagagaaggctccctgttggccaggtgcag |
| | 3prime | tggctcacgcctgtaatgccagcactttgagaggctgagttgggaggatcacttgagcccaggagttcat |
| | cargo_3 | gatcagcctggaacgaggaattctcttcttttttttctgcaggaCctagaacagaaaatgaaagtggtaga |
| | | gaatctccaggatgactttgatttcaactatGACTACAAAGACGATGACGACAAGT |
| | | AA |
| 136 | TERT | ctgtgtgagtggaggcgaggagactgacagtggccacgcagaaactcagacatcacctctgccctcagg |
| | 3prime | gcctggcctggcggtgtcccccactctctctctgacccccaccactccagaccccaagggcagggcgg |
| | cargo_1 | gctgtgtcccctcaacgaggaattctcttcttttttttctgcaggtCgatgtgacgggcgcgtacgacacca |
| | | tcccccaggacaggctcacggaggtcatcgccGACTACAAAGACGATGACGACA |
| | | AGTAA |
| 137 | TERT | catcacctctgccctcagggcctggcctggcggtgtcccccactctctctctgacccccaccactccagac |
| | 3prime | cccaagggcaggggggctgtgtcccctctctgagcctcaggacaggagacccctggctcaggactg |
| | cargo_2 | gggtgcaaggcaaacgaggaattctcttcttttttttctgcaggtCgatgtgacgggcgcgtacgacacc |
| | | atcccccaggacaggctcacggaggtcatcgccGACTACAAAGACGATGACGAC |
| | | AAGTAA |
| 138 | TERT | ctgacccccaccactccagaccccaagggcaggggggctgtgtcccctctctgagcctcaggacagg |
| | 3prime | agacccctggctcaggactggggtgcaaggcaccggggcctggtggctgagccgttgcggttccttct |
| | cargo_3 | ctgacggaaactggaacgaggaattctcttcttttttttctgcaggtCgatgtgacgggcgcgtacgacac |
| | | catcccccaggacaggctcacggaggtcatcgccGACTACAAAGACGATGACGAC |
| | | AAGTAA |
| 139 | TUG1 | ctagaaggggcagggacaaaacaggtaaaataacaaatgcatggaattacaaacacaggactctaagtg |
| | 3prime | ggtctgctgtcagcacatcggcagcctgatggctgttaattcttgatgagcctggcttaggcaaagacaaa |
| | cargo_1 | tgataaatgaaacgaggaattctcttcttttttttctgcagtcctgtgcctcctgattgctgagtgttcacctgg |
| | | accttctgactaccttccctgtgctaGACTACAAAGACGATGACGACAAGTAA |
| 140 | TUG1 | aaacacaggactctaagtgggtctgctgtcagcacatcggcagcctgatggctgttaattcttgatgagcct |
| | 3prime | ggcttaggcaaagacaaatgataaatgaaaacaaacaacagcaatccaaaaaagaaaacacaaaagtc |
| | cargo_2 | tgattaacacaacgaggaattctcttcttttttttctgcagtcctgtgcctcctgattgctgagtgttcacctgg |
| | | accttctgactaccttccctgtgctaGACTACAAAGACGATGACGACAAGTAA |
| 141 | TUG1 | gctgttaattcttgatgagcctggcttaggcaaagacaaatgataaatgaaaacaaacaacagcaatccaa |
| | 3prime | aaaagaaaacacaaaagtctgattaacactctcgatttgtgggaactgtctcgcgaagcagcacacagaa |
| | cargo_3 | actaagcctaacgaggaattctcttcttttttttctgcagtcctgtgcctcctgattgctgagtgttcacctgga |
| | | ccttctgactaccttccctgtgctaGACTACAAAGACGATGACGACAAGTAA |

[0235] Table 4 below shows trans-splicing cargo template sequences for 5TS on COL7A1 intron48 (Gluc reporter).

TABLE 4

| SEQ | | |
|---|---|---|
| ID | | |
| NO | ID | Sequence |
| 142 | 5TS_1- | atgGGAGTCAAAGTTCTGTTTGCCCTGATCTGCATCGCTGTGG |
| | 76aa_int48_ | CCGAGGCCAAGCCCACCGAGAACAACGAAGACTTCAACAT |
| | 2_noBP | CGTGGCCGTGGCCAGCAACTTCGCGACCACGGATCTCGATG |
| | | CTGACCGCGGGAAGTTGCCCGGCAAGAAGCTGCCGCTGGA |
| | | GGTGCTCAAAGAGATGGAAGCCAATGCCCGGAAAGCTGGC |
| | | TGCACCAGGGGCTGTCTGATCTGCGTAAGCACGTTTGGGGT |
| | | TGAAAAAATCTATTGTACCCCAGGCTCCAGTTAACCCCCTG |
| | | ACCCAGCAAGTCCTGTGACCCCCCAAGTCCCATAGATAGGC |
| | | CCTATGACCTAGACCTC |
| 143 | 5TS_1- | atgGGAGTCAAAGTTCTGTTTGCCCTGATCTGCATCGCTGTGG |
| | 76aa_int48_ | CCGAGGCCAAGCCCACCGAGAACAACGAAGACTTCAACAT |
| | 2_BP | CGTGGCCGTGGCCAGCAACTTCGCGACCACGGATCTCGATG |
| | | CTGACCGCGGGAAGTTGCCCGGCAAGAAGCTGCCGCTGGA |
| | | GGTGCTCAAAGAGATGGAAGCCAATGCCCGGAAAGCTGGC |
| | | TGCACCAGGGGCTGTCTGATCTGCGTAAGCCCGCGGAACAT |
| | | TATTATAACGTTGCTCGAATACTAACACGTTTGGGGTTGAA |
| | | AAAATCTATTGTACCCCAGGCTCCAGTTAACCCCCTGACCC |
| | | AGCAAGTCCTGTGACCCCCCAAGTCCCATAGATAGGCCCTA |
| | | TGACCTAGACCTC |
| 144 | int48 1- | AACCCTGTAGAAACCTCCCCTTGCCCCATACCAGGCTTACA |
| | 40bp_5TS_ | ATCGGCTTCAACGTGCTCCACGGCTGGCGatgGGAGTCAAAG |
| | 1- | TTCTGTTTGCCCTGATCTGCATCGCTGTGGCCGAGGCCAAGC |
| | 76aa_int48_ | CCACCGAGAACAACGAAGACTTCAACATCGTGGCCGTGGCC |
| | 2_noBP | AGCAACTTCGCGACCACGGATCTCGATGCTGACCGCGGGAA |
| | | GTTGCCCGGCAAGAAGCTGCCGCTGGAGGTGCTCAAAGAG |
| | | ATGGAAGCCAATGCCCGGAAAGCTGGCTGCACCAGGGGCT |
| | | GTCTGATCTGCGTAAGCACGTTTGGGGTTGAAAAAATCTAT |
| | | TGTACCCCAGGCTCCAGTTAACCCCCTGACCCAGCAAGTCC |
| | | TGTGACCCCCCAAGTCCCATAGATAGGCCCTATGACCTAGA |
| | | CCTC |
| 145 | int48_1- | AACCCTGTAGAAACCTCCCCTTGCCCCATACCAGGCTTACA |
| | 40bp_5TS_ | ATCGGCTTCAACGTGCTCCACGGCTGGCGatgGGAGTCAAAG |
| | 1- | TTCTGTTTGCCCTGATCTGCATCGCTGTGGCCGAGGCCAAGC |
| | 76aa_int48_ | CCACCGAGAACAACGAAGACTTCAACATCGTGGCCGTGGCC |
| | 2_BP | AGCAACTTCGCGACCACGGATCTCGATGCTGACCGCGGGAA |
| | | GTTGCCCGGCAAGAAGCTGCCGCTGGAGGTGCTCAAAGAG |
| | | ATGGAAGCCAATGCCCGGAAAGCTGGCTGCACCAGGGGCT |
| | | GTCTGATCTGCGTAAGCCCGCGGAACATTATTATAACGTTG |
| | | CTCGAATACTAACACGTTTGGGGTTGAAAAAATCTATTGTA |
| | | CCCCAGGCTCCAGTTAACCCCCTGACCCAGCAAGTCCTGTG |
| | | ACCCCCCAAGTCCCATAGATAGGCCCTATGACCTAGACCTC |
| 146 | EF1a_1- | gaaataccagtgtgcagatcttggcccgcatttacaagactatcttgccagaaaaaaagcgtcgcag |
| | 80bp_5TS_ | caggtcatcaaaaAATCGGCTTCAACGTGCTCCACGGCTGGCGatgG |
| | 1- | GAGTCAAAGTTCTGTTTGCCCTGATCTGCATCGCTGTGGCCG |
| | 76aa_int48_ | AGGCCAAGCCCACCGAGAACAACGAAGACTTCAACATCGT |
| | 2_noBP | GGCCGTGGCCAGCAACTTCGCGACCACGGATCTCGATGCTG |
| | | ACCGCGGGAAGTTGCCCGGCAAGAAGCTGCCGCTGGAGGT |
| | | GCTCAAAGAGATGGAAGCCAATGCCCGGAAAGCTGGCTGC |
| | | ACCAGGGGCTGTCTGATCTGCGTAAGCACGTTTGGGGTTGA |
| | | AAAAATCTATTGTACCCCAGGCTCCAGTTAACCCCCTGACC |
| | | CAGCAAGTCCTGTGACCCCCCAAGTCCCATAGATAGGCCCT |
| | | ATGACCTAGACCTC |
| 147 | EF1a_1- | gaaataccagtgtgcagatcttggcccgcatttacaagactatcttgccagaaaaaaagcgtcgcag |
| | 80bp_5TS_ | caggtcatcaaaaAATCGGCTTCAACGTGCTCCACGGCTGGCGatgG |
| | 1- | GAGTCAAAGTTCTGTTTGCCCTGATCTGCATCGCTGTGGCCG |
| | 76aa_int48_ | AGGCCAAGCCCACCGAGAACAACGAAGACTTCAACATCGT |
| | 2_BP | GGCCGTGGCCAGCAACTTCGCGACCACGGATCTCGATGCTG |
| | | ACCGCGGGAAGTTGCCCGGCAAGAAGCTGCCGCTGGAGGT |
| | | GCTCAAAGAGATGGAAGCCAATGCCCGGAAAGCTGGCTGC |
| | | ACCAGGGGCTGTCTGATCTGCGTAAGCCCGCGGAACATTAT |
| | | TATAACGTTGCTCGAATACTAACACGTTTGGGGTTGAAAAA |
| | | ATCTATTGTACCCCAGGCTCCAGTTAACCCCCTGACCCAGC |
| | | AAGTCCTGTGACCCCCCAAGTCCCATAGATAGGCCCTATGA |
| | | CCTAGACCTC |
| 148 | EF1a_2- | cagggccgggaagcggccatctttccgctcacgcaactggtgccgaccgggccagccttgccgc |
| | 80bp_5TS_ | ccagggcggggcgataAATCGGCTTCAACGTGCTCCACGGCTGGCGa |
| | 1- | tgGGAGTCAAAGTTCTGTTTGCCCTGATCTGCATCGCTGTGG |
| | 76aa_int48_ | CCGAGGCCAAGCCCACCGAGAACAACGAAGACTTCAACAT |
| | 2_noBP | CGTGGCCGTGGCCAGCAACTTCGCGACCACGGATCTCGATG |
| | | CTGACCGCGGGAAGTTGCCCGGCAAGAAGCTGCCGCTGGA |
| | | GGTGCTCAAAGAGATGGAAGCCAATGCCCGGAAAGCTGGC |
| | | TGCACCAGGGGCTGTCTGATCTGCGTAAGCACGTTTGGGGT |
| | | TGAAAAAATCTATTGTACCCCAGGCTCCAGTTAACCCCCTG |
| | | ACCCAGCAAGTCCTGTGACCCCCCAAGTCCCATAGATAGGC |
| | | CCTATGACCTAGACCTC |
| 149 | EF1a_2- | cagggccgggaagcggccatctttccgctcacgcaactggtgccgaccgggccagccttgccgc |
| | 80bp_5TS_ | ccagggcggggcgataAATCGGCTTCAACGTGCTCCACGGCTGGCGa |
| | 1- | tgGGAGTCAAAGTTCTGTTTGCCCTGATCTGCATCGCTGTGG |
| | 76aa_int48_ | CCGAGGCCAAGCCCACCGAGAACAACGAAGACTTCAACAT |
| | 2_BP | CGTGGCCGTGGCCAGCAACTTCGCGACCACGGATCTCGATG |
| | | CTGACCGCGGGAAGTTGCCCGGCAAGAAGCTGCCGCTGGA |
| | | GGTGCTCAAAGAGATGGAAGCCAATGCCCGGAAAGCTGGC |
| | | TGCACCAGGGGCTGTCTGATCTGCGTAAGCCCGCGGAACAT |
| | | TATTATAACGTTGCTCGAATACTAACACGTTTGGGGTTGAA |
| | | AAAATCTATTGTACCCCAGGCTCCAGTTAACCCCCTGACCC |
| | | AGCAAGTCCTGTGACCCCCCAAGTCCCATAGATAGGCCCTA |
| | | TGACCTAGACCTC |
| 150 | EF1a_3- | tcacgacacctgaaatggaagaaaaaaactttgaaccactgtctgaggcttgagaatgaaccaagat |
| | 80bp_5TS_ | ccaaactcaaaaaAATCGGCTTCAACGTGCTCCACGGCTGGCGatgG |
| | 1- | GAGTCAAAGTTCTGTTTGCCCTGATCTGCATCGCTGTGGCCG |
| | 76aa_int48_ | AGGCCAAGCCCACCGAGAACAACGAAGACTTCAACATCGT |
| | 2_noBP | GGCCGTGGCCAGCAACTTCGCGACCACGGATCTCGATGCTG |
| | | ACCGCGGGAAGTTGCCCGGCAAGAAGCTGCCGCTGGAGGT |
| | | GCTCAAAGAGATGGAAGCCAATGCCCGGAAAGCTGGCTGC |
| | | ACCAGGGGCTGTCTGATCTGCGTAAGCACGTTTGGGGTTGA |
| | | AAAAATCTATTGTACCCCAGGCTCCAGTTAACCCCCTGACC |
| | | CAGCAAGTCCTGTGACCCCCCAAGTCCCATAGATAGGCCCT |
| | | ATGACCTAGACCTC |
| 151 | EF1a_3- | tcacgacacctgaaatggaagaaaaaaactttgaaccactgtctgaggcttgagaatgaaccaagat |
| | 80bp_5TS_ | ccaaactcaaaaaAATCGGCTTCAACGTGCTCCACGGCTGGCGatgG |
| | 1- | GAGTCAAAGTTCTGTTTGCCCTGATCTGCATCGCTGTGGCCG |
| | 76aa_int48_ | AGGCCAAGCCCACCGAGAACAACGAAGACTTCAACATCGT |
| | 2_BP | GGCCGTGGCCAGCAACTTCGCGACCACGGATCTCGATGCTG |
| | | ACCGCGGGAAGTTGCCCGGCAAGAAGCTGCCGCTGGAGGT |
| | | GCTCAAAGAGATGGAAGCCAATGCCCGGAAAGCTGGCTGC |
| | | ACCAGGGGCTGTCTGATCTGCGTAAGCCCGCGGAACATTAT |
| | | TATAACGTTGCTCGAATACTAACACGTTTGGGGTTGAAAAA |
| | | ATCTATTGTACCCCAGGCTCCAGTTAACCCCCTGACCCAGC |
| | | AAGTCCTGTGACCCCCCAAGTCCCATAGATAGGCCCTATGA |
| | | CCTAGACCTC |

[0236] Table 5 below shows trans-splicing cargo template sequences for 3′TS on COL7A1 intron46 (Gluc reporter).

TABLE 5

| SEQ | | |
|---|---|---|
| ID | | |
| NO | ID | Sequence |
| 152 | 3TS_ | TATCCCTATGATGTCCCCGATTATGCCGGTTCAAGAGCCCTGG |
| | intron46_ | TCGTGATTAGACTGAGCCGAGTGACAGACGCCACCACAACGA |
| | Gluc_ | GGAATTCTCTTCTTTTTTTTCTGCAGCTGTCCCACATCAAGTGC |
| | scrambled | ACGCCCAAGATGAAGAAGTTCATCCCAGGACGCTGCCACACC |
| | control | TACGAAGGCGACAAAGAGTCCGCAcagGGCGGCATAGGCGAGG |
| | | CGATCGTCGACATTCCTGAGATTCCTGGGTTCAAGGACTTGGA |
| | | GCCCATGGAGCAGTTCATCGCACAGGTCGATCTGTGTGTGGAC |
| | | TGCACAACTGGCTGCCTCAAAGGGCTTGCCAACGTGCAGTGTT |
| | | CTGACCTGCTCAAGAAGTGGCTGCCGCAACGCTGTGCGACCTT |
| | | TGCCAGCAAGATCCAGGGCCAGGTGGACAAGATCAAGGGGGC |
| | | CGGTGGTGACTAA |
| 153 | 3TS_ | GTGAGTGACGGGAGGATGGCGCTCTGAGCACAGCACAGCCCT |
| | intron46_ | TGAGCAGTGACCCTCCTATAGAACACTATCTGGGCTGTAACGA |
| | Gluc_ | GGAATTCTCTTCTTTTTTTTCTGCAGCTGTCCCACATCAAGTGC |
| | cargo_1 | ACGCCCAAGATGAAGAAGTTCATCCCAGGACGCTGCCACACC |
| | | TACGAAGGCGACAAAGAGTCCGCAcagGGCGGCATAGGCGAGG |
| | | CGATCGTCGACATTCCTGAGATTCCTGGGTTCAAGGACTTGGA |
| | | GCCCATGGAGCAGTTCATCGCACAGGTCGATCTGTGTGTGGAC |
| | | TGCACAACTGGCTGCCTCAAAGGGCTTGCCAACGTGCAGTGTT |
| | | CTGACCTGCTCAAGAAGTGGCTGCCGCAACGCTGTGCGACCTT |
| | | TGCCAGCAAGATCCAGGGCCAGGTGGACAAGATCAAGGGGGC |
| | | CGGTGGTGACTAA |
| 154 | 3TS_ | CTTGAGCAGTGACCCTCCTATAGAACACTATCTGGGCTGTGAT |
| | intron46_ | TCCACAGTGCTGGGCCCGTGAGCAGGCTGGGAGCTCTAACGA |
| | Gluc_ | GGAATTCTCTTCTTTTTTTTCTGCAGCTGTCCCACATCAAGTGC |
| | cargo_2 | ACGCCCAAGATGAAGAAGTTCATCCCAGGACGCTGCCACACC |
| | | TACGAAGGCGACAAAGAGTCCGCAcagGGCGGCATAGGCGAGG |
| | | CGATCGTCGACATTCCTGAGATTCCTGGGTTCAAGGACTTGGA |
| | | GCCCATGGAGCAGTTCATCGCACAGGTCGATCTGTGTGTGGAC |
| | | TGCACAACTGGCTGCCTCAAAGGGCTTGCCAACGTGCAGTGTT |
| | | CTGACCTGCTCAAGAAGTGGCTGCCGCAACGCTGTGCGACCTT |
| | | TGCCAGCAAGATCCAGGGCCAGGTGGACAAGATCAAGGGGGC |
| | | CGGTGGTGACTAA |
| 155 | 3TS_ | GATTCCACAGTGCTGGGCCCGTGAGCAGGCTGGGAGCTCTGC |
| | intron46_ | GGCTCTCCTTCTGCTAGAACCTGCCCCCAGACTCTTGGAACGA |
| | Gluc_ | GGAATTCTCTTCTTTTTTTTCTGCAGCTGTCCCACATCAAGTGC |
| | cargo_3 | ACGCCCAAGATGAAGAAGTTCATCCCAGGACGCTGCCACACC |
| | | TACGAAGGCGACAAAGAGTCCGCAcagGGCGGCATAGGCGAGG |
| | | CGATCGTCGACATTCCTGAGATTCCTGGGTTCAAGGACTTGGA |
| | | GCCCATGGAGCAGTTCATCGCACAGGTCGATCTGTGTGTGGAC |
| | | TGCACAACTGGCTGCCTCAAAGGGCTTGCCAACGTGCAGTGTT |
| | | CTGACCTGCTCAAGAAGTGGCTGCCGCAACGCTGTGCGACCTT |
| | | TGCCAGCAAGATCCAGGGCCAGGTGGACAAGATCAAGGGGGC |
| | | CGGTGGTGACTAA |
| 156 | 3TS_ | GCGGCTCTCCTTCTGCTAGAACCTGCCCCCAGACTCTTGGCTA |
| | intron46_ | TGATCCTGTGACCCCAAGACCGCCATGCAGGTCATGAAACGA |
| | G1uc_ | GGAATTCTCTTCTTTTTTTTCTGCAGCTGTCCCACATCAAGTGC |
| | cargo_4 | ACGCCCAAGATGAAGAAGTTCATCCCAGGACGCTGCCACACC |
| | | TACGAAGGCGACAAAGAGTCCGCAcagGGCGGCATAGGCGAGG |
| | | CGATCGTCGACATTCCTGAGATTCCTGGGTTCAAGGACTTGGA |
| | | GCCCATGGAGCAGTTCATCGCACAGGTCGATCTGTGTGTGGAC |
| | | TGCACAACTGGCTGCCTCAAAGGGCTTGCCAACGTGCAGTGTT |
| | | CTGACCTGCTCAAGAAGTGGCTGCCGCAACGCTGTGCGACCTT |
| | | TGCCAGCAAGATCCAGGGCCAGGTGGACAAGATCAAGGGGGC |
| | | CGGTGGTGACTAA |
| 157 | 3TS_ | CTATGATCCTGTGACCCCAAGACCGCCATGCAGGTCATGAGCT |
| | intron46_ | CTTTGTGTCAGTCCATTTTGTATAACCCCTTCCCTGCAACGAGG |
| | Gluc_ | AATTCTCTTCTTTTTTTTCTGCAGCTGTCCCACATCAAGTGCAC |
| | cargo_5 | GCCCAAGATGAAGAAGTTCATCCCAGGACGCTGCCACACCTA |
| | | CGAAGGCGACAAAGAGTCCGCAcagGGCGGCATAGGCGAGGC |
| | | GATCGTCGACATTCCTGAGATTCCTGGGTTCAAGGACTTGGAG |
| | | CCCATGGAGCAGTTCATCGCACAGGTCGATCTGTGTGTGGACT |
| | | GCACAACTGGCTGCCTCAAAGGGCTTGCCAACGTGCAGTGTTC |
| | | TGACCTGCTCAAGAAGTGGCTGCCGCAACGCTGTGCGACCTTT |
| | | GCCAGCAAGATCCAGGGCCAGGTGGACAAGATCAAGGGGGCC |
| | | GGTGGTGACTAA |
| 158 | 3TS_ | TGTCAGCGGTGACTCTGTGACTTCTGGGCGGGGACTGAGCTGT |
| | intron46_ | ATGACTTCCAATTCCATGTGACCTCCATTCCAATGAAAACGAG |
| | Gluc_ | GAATTCTCTTCTTTTTTTTCTGCAGCTGTCCCACATCAAGTGCA |
| | cargo_6 | CGCCCAAGATGAAGAAGTTCATCCCAGGACGCTGCCACACCT |
| | | ACGAAGGCGACAAAGAGTCCGCAcagGGCGGCATAGGCGAGG |
| | | CGATCGTCGACATTCCTGAGATTCCTGGGTTCAAGGACTTGGA |
| | | GCCCATGGAGCAGTTCATCGCACAGGTCGATCTGTGTGTGGAC |
| | | TGCACAACTGGCTGCCTCAAAGGGCTTGCCAACGTGCAGTGTT |
| | | CTGACCTGCTCAAGAAGTGGCTGCCGCAACGCTGTGCGACCTT |
| | | TGCCAGCAAGATCCAGGGCCAGGTGGACAAGATCAAGGGGGC |
| | | CGGTGGTGACTAA |
| 159 | 3TS_ | TGTATGACTTCCAATTCCATGTGACCTCCATTCCAATGAAGAC |
| | intron46_ | TTTGATCATACAACCCCAAGGCAGGGCCAAGCTGTATAACGA |
| | Gluc_ | GGAATTCTCTTCTTTTTTTTCTGCAGCTGTCCCACATCAAGTGC |
| | cargo_7 | ACGCCCAAGATGAAGAAGTTCATCCCAGGACGCTGCCACACC |
| | | TACGAAGGCGACAAAGAGTCCGCAcagGGCGGCATAGGCGAGG |
| | | CGATCGTCGACATTCCTGAGATTCCTGGGTTCAAGGACTTGGA |
| | | GCCCATGGAGCAGTTCATCGCACAGGTCGATCTGTGTGTGGAC |
| | | TGCACAACTGGCTGCCTCAAAGGGCTTGCCAACGTGCAGTGTT |
| | | CTGACCTGCTCAAGAAGTGGCTGCCGCAACGCTGTGCGACCTT |
| | | TGCCAGCAAGATCCAGGGCCAGGTGGACAAGATCAAGGGGGC |
| | | CGGTGGTGACTAA |
| 160 | 3TS_ | GACTTTGATCATACAACCCCAAGGCAGGGCCAAGCTGTATCTG |
| | intron46_ | TCCTGTTTGTTTTCAGACaACGGATCTCGATGCTGACAACGAG |
| | Gluc_ | GAATTCTCTTCTTTTTTTTCTGCAGCTGTCCCACATCAAGTGCA |
| | cargo_8 | CGCCCAAGATGAAGAAGTTCATCCCAGGACGCTGCCACACCT |
| | | ACGAAGGCGACAAAGAGTCCGCAcagGGCGGCATAGGCGAGG |
| | | CGATCGTCGACATTCCTGAGATTCCTGGGTTCAAGGACTTGGA |
| | | GCCCATGGAGCAGTTCATCGCACAGGTCGATCTGTGTGTGGAC |
| | | TGCACAACTGGCTGCCTCAAAGGGCTTGCCAACGTGCAGTGTT |
| | | CTGACCTGCTCAAGAAGTGGCTGCCGCAACGCTGTGCGACCTT |
| | | TGCCAGCAAGATCCAGGGCCAGGTGGACAAGATCAAGGGGGC |
| | | CGGTGGTGACTAA |
| 161 | 3TS_ | CAGGGCCAAGCTGTATCTGTCCTGTTTGTTTTCAGACaACGGAT |
| | intron46_ | CTCGATGCTGACCGCGGCAGTGGAGAGGGCAGAGGAAACGAG |
| | Gluc_ | GAATTCTCTTCTTTTTTTTCTGCAGCTGTCCCACATCAAGTGCA |
| | cargo_9 | CGCCCAAGATGAAGAAGTTCATCCCAGGACGCTGCCACACCT |
| | | ACGAAGGCGACAAAGAGTCCGCAcagGGCGGCATAGGCGAGG |
| | | CGATCGTCGACATTCCTGAGATTCCTGGGTTCAAGGACTTGGA |
| | | GCCCATGGAGCAGTTCATCGCACAGGTCGATCTGTGTGTGGAC |
| | | TGCACAACTGGCTGCCTCAAAGGGCTTGCCAACGTGCAGTGTT |
| | | CTGACCTGCTCAAGAAGTGGCTGCCGCAACGCTGTGCGACCTT |
| | | TGCCAGCAAGATCCAGGGCCAGGTGGACAAGATCAAGGGGGC |
| | | CGGTGGTGACTAA |
| 162 | 3TS_ | GGATCTCGATGCTGACCGCGGCAGTGGAGAGGGCAGAGGAAG |
| | intron46_ | TCTGCTAACATGCGGTGACGTCGAGGAGAATCCTGGCCAACG |
| | Gluc_ | AGGAATTCTCTTCTTTTTTTTCTGCAGCTGTCCCACATCAAGTG |
| | cargo_10 | CACGCCCAAGATGAAGAAGTTCATCCCAGGACGCTGCCACAC |
| | | CTACGAAGGCGACAAAGAGTCCGCAcagGGCGGCATAGGCGAG |
| | | GCGATCGTCGACATTCCTGAGATTCCTGGGTTCAAGGACTTGG |
| | | AGCCCATGGAGCAGTTCATCGCACAGGTCGATCTGTGTGTGGA |
| | | CTGCACAACTGGCTGCCTCAAAGGGCTTGCCAACGTGCAGTGT |
| | | TCTGACCTGCTCAAGAAGTGGCTGCCGCAACGCTGTGCGACCT |
| | | TTGCCAGCAAGATCCAGGGCCAGGTGGACAAGATCAAGGGGG |
| | | CCGGTGGTGACTAA |

[0237] Table 6 below shows cargo template sequences for internal trans-splicing on both COL7A1 intron46 and intron48 (Gluc reporter).

TABLE 6

| SEQ | | |
|---|---|---|
| ID | | |
| NO | ID | Sequence |
| 163 | internal 37-76 aa | CTGGGTGGGACGTGCTCCATTTATACCCTGCGCAGGCTG |
| | cargo, left | GACCGAGGACCGCAAGCTGCGACGGTGCACAAGTAATT |
| | scrambled right | GACAACGAGGAATTCTCTTCTTTTTTTTCTGCAGACCACG |
| | int48_2 | GATCTCGATGCTGACCGCGGGAAGTTGCCCGGCAAGAAG |
| | | CTGCCGCTGGAGGTGCTCAAAGAGATGGAAGCCAATGCC |
| | | CGGAAAGCTGGCTGCACCAGGGGCTGTCTGATCTGCGTA |
| | | AGCGGCGCGTAGGATCCAGGCTCCAGTTAACCCCCTGAC |
| | | CCAGCAAGTCCTGTGACCCCCCAAGTCCCATAGATAGGC |
| | | CCTATGACCTAGACCTC |
| 164 | internal 37-76 aa | CTGGGTGGGACGTGCTCCATTTATACCCTGCGCAGGCTG |
| | cargo, left | GACCGAGGACCGCAAGCTGCGACGGTGCACAAGTAATT |
| | scrambled right | GACAACGAGGAATTCTCTTCTTTTTTTTCTGCAGACCACG |
| | int48_3 | GATCTCGATGCTGACCGCGGGAAGTTGCCCGGCAAGAAG |
| | | CTGCCGCTGGAGGTGCTCAAAGAGATGGAAGCCAATGCC |
| | | CGGAAAGCTGGCTGCACCAGGGGCTGTCTGATCTGCGTA |
| | | AGCGGCGCGTAGGATTGGAGGTGACAAAGACCATCAGT |
| | | GCTAGTCCCAGGCTCCAGTTAACCCCCTGACCCAGCAAG |
| | | TCCTGTGACCCCCCAAGT |
| 165 | internal 37-76 aa | TCATGACCTGCATGGCGGTCTTGGGGTCACAGGATCATA |
| | cargo, left | GCCAAGAGTCTGGGGGCAGGTTCTAGCAGAAGGAGAGC |
| | int46_4 right | CGCAACGAGGAATTCTCTTCTTTTTTTTCTGCAGACCACG |
| | scframbled | GATCTCGATGCTGACCGCGGGAAGTTGCCCGGCAAGAAG |
| | | CTGCCGCTGGAGGTGCTCAAAGAGATGGAAGCCAATGCC |
| | | CGGAAAGCTGGCTGCACCAGGGGCTGTCTGATCTGCGTA |
| | | AGCGGCGCGTAGGATCTGGGTGGGACGTGCTCCATTTAT |
| | | ACCCTGCGCAGGCTGGACCGAGGACCGCAAGATGCGAC |
| | | GGTGCACAAGTAATTGAC |
| 166 | internal 37-76 aa | GCGGCTCTCCTTCTGCTAGAACCTGCCCCCAGACTCTTGG |
| | cargo, int46_4, | CTATGATCCTGTGACCCCAAGACCGCCATGCAGGTCATG |
| | int48_1 | AAACGAGGAATTCTCTTCTTTTTTTTCTGCAGACCACGGA |
| | | TCTCGATGCTGACCGCGGGAAGTTGCCCGGCAAGAAGCT |
| | | GCCGCTGGAGGTGCTCAAAGAGATGGAAGCCAATGCCC |
| | | GGAAAGCTGGCTGCACCAGGGGCTGTCTGATCTGCGTAA |
| | | GCGGCGCGTAGGATCCCCCCAAGTCCCATAGATAGGCCC |
| | | TATGACCTAGACCTCAACCCTGTAGAAACCTCCCCTTGC |
| | | CCCATACCAGGCTTAC |
| 167 | internal 37-76 aa | GCGGCTCTCCTTCTGCTAGAACCTGCCCCCAGACTCTTGG |
| | cargo, int46_4, | CTATGATCCTGTGACCCCAAGACCGCCATGCAGGTCATG |
| | int48_2 | AAACGAGGAATTCTCTTCTTTTTTTTCTGCAGACCACGGA |
| | | TCTCGATGCTGACCGCGGGAAGTTGCCCGGCAAGAAGCT |
| | | GCCGCTGGAGGTGCTCAAAGAGATGGAAGCCAATGCCC |
| | | GGAAAGCTGGCTGCACCAGGGGCTGTCTGATCTGCGTAA |
| | | GCGGCGCGTAGGATCCAGGCTCCAGTTAACCCCCTGACC |
| | | CAGCAAGTCCTGTGACCCCCCAAGTCCCATAGATAGGCC |
| | | CTATGACCTAGACCTC |
| 168 | internal 37-76 aa | GCGGCTCTCCTTCTGCTAGAACCTGCCCCCAGACTCTTGG |
| | cargo, int46_4, | CTATGATCCTGTGACCCCAAGACCGCCATGCAGGTCATG |
| | int48_3 | AAACGAGGAATTCTCTTCTTTTTTTTCTGCAGACCACGGA |
| | | TCTCGATGCTGACCGCGGGAAGTTGCCCGGCAAGAAGCT |
| | | GCCGCTGGAGGTGCTCAAAGAGATGGAAGCCAATGCCC |
| | | GGAAAGCTGGCTGCACCAGGGGCTGTCTGATCTGCGTAA |
| | | GCGGCGCGTAGGATTGGAGGTGACAAAGACCATCAGTG |
| | | CTAGTCCCAGGCTCCAGTTAACCCCCTGACCCAGCAAGT |
| | | CCTGTGACCCCCCAAGT |
| 169 | internal 37-76 aa | TGTCAGCGGTGACTCTGTGACTTCTGGGCGGGGACTGAG |
| | cargo, int46_4, | CTGTATGACTTCCAATTCCATGTGACCTCCATTCCAATGA |
| | int48_1 | AAACGAGGAATTCTCTTCTTTTTTTTCTGCAGACCACGGA |
| | | TCTCGATGCTGACCGCGGGAAGTTGCCCGGCAAGAAGCT |
| | | GCCGCTGGAGGTGCTCAAAGAGATGGAAGCCAATGCCC |
| | | GGAAAGCTGGCTGCACCAGGGGCTGTCTGATCTGCGTAA |
| | | GCGGCGCGTAGGATCCCCCCAAGTCCCATAGATAGGCCC |
| | | TATGACCTAGACCTCAACCCTGTAGAAACCTCCCCTTGC |
| | | CCCATACCAGGCTTAC |
| 170 | internal 37-76 aa | TGTCAGCGGTGACTCTGTGACTTCTGGGCGGGGACTGAG |
| | cargo, int46_4, | CTGTATGACTTCCAATTCCATGTGACCTCCATTCCAATGA |
| | int48_2 | AAACGAGGAATTCTCTTCTTTTTTTTCTGCAGACCACGGA |
| | | TCTCGATGCTGACCGCGGGAAGTTGCCCGGCAAGAAGCT |
| | | GCCGCTGGAGGTGCTCAAAGAGATGGAAGCCAATGCCC |
| | | GGAAAGCTGGCTGCACCAGGGGCTGTCTGATCTGCGTAA |
| | | GCGGCGCGTAGGATCCAGGCTCCAGTTAACCCCCTGACC |
| | | CAGCAAGTCCTGTGACCCCCCAAGTCCCATAGATAGGCC |
| | | CTATGACCTAGACCTC |
| 171 | internal 37-76 aa | TGTCAGCGGTGACTCTGTGACTTCTGGGCGGGGACTGAG |
| | cargo, int46_4, | CTGTATGACTTCCAATTCCATGTGACCTCCATTCCAATGA |
| | int48_3 | AAACGAGGAATTCTCTTCTTTTTTTTCTGCAGACCACGGA |
| | | TCTCGATGCTGACCGCGGGAAGTTGCCCGGCAAGAAGCT |
| | | GCCGCTGGAGGTGCTCAAAGAGATGGAAGCCAATGCCC |
| | | GGAAAGCTGGCTGCACCAGGGGCTGTCTGATCTGCGTAA |
| | | GCGGCGCGTAGGATTGGAGGTGACAAAGACCATCAGTG |
| | | CTAGTCCCAGGCTCCAGTTAACCCCCTGACCCAGCAAGT |
| | | CCTGTGACCCCCCAAGT |

[0238] Table 7 below shows the sequences of splicing proteins for fusion.

TABLE 7

| SEQ | | |
|---|---|---|
| ID | | |
| NO | ID | Sequence |
| 179 | RBM17 | MSLYDDLGVETSDSKTEGWSKNFKLLQSQLQVKKAALTQAKSQRTKQSTV |
| | | LAPVIDLKRGGSSDDRQIVDTPPHVAAGLKDPVPSGFSAGEVLIPLADEYDP |
| | | MFPNDYEKVVKRQREERQRQRELERQKEIEEREKRRKDRHEASGFARRPDP |
| | | DSDEDEDYERERRKRSMGGAAIAPPTSLVEKDKELPRDFPYEEDSRPRSQSS |
| | | KAAIPPPVYEEQDRPRSPTGPSNSFLANMGGTVAHKIMQKYGFREGQGLGK |
| | | HEQGLSTALSVEKTSKRGGKIIVGDATEKDASKKSDSNPLTEILKCPTKVVLL |
| | | RNMVGAGEVDEDLEVETKEECEKYGKVGKCVIFEIPGAPDDEAVRIFLEFER |
| | | VESAIKAVVDLNGRYFGGRVVKACFYNLDKFRVLDLAEQV |
| 180 | SF3B6 | MAMQAAKRANIRLPPEVNRILYIRNLPYKITAEEMYDIFGKYGPIRQIRVGNT |
| | | PETRGTAYVVYEDIFDAKNACDHLSGFNVCNRYLVVLYYNANRAFQKMDT |
| | | KKKEEQLKLLKEKYGINTDPPK |
| 181 | U2AF1 | MAEYLASIFGTEKDKVNCSFYFKIGACRHGDRCSRLHNKPTFSQTIALLNIYR |
| | | NPQNSSQSADGLRCAVSDVEMQEHYDEFFEEVFTEMEEKYGEVEEMNVCD |
| | | NLGDHLVGNVYVKFRREEDAEKAVIDLNNRWFNGQPIHAELSPVTDFREAC |
| | | CRQYEMGECTRGGFCNFMHLKPISRELRRELYGRRRKKHRSRSRSRERRSRS |
| | | RDRGRGGGGGGGGGGGGRERDRRRSRDRERSGRF |
| 182 | U2AF2 | MSDFDEFERQLNENKQERDKENRHRKRSHSRSRSRDRKRRSRSRDRRNRDQ |
| | | RSASRDRRRRSKPLTRGAKEEHGGLIRSPRHEKKKKVRKYWDVPPPGFEHIT |
| | | PMQYKAMQAAGQIPATALLPTMTPDGLAVTPTPVPVVGSQMTRQARRLYV |
| | | GNIPFGITEEAMMDFFNAQMRLGGLTQAPGNPVLAVQINQDKNFAFLEFRS |
| | | VDETTQAMAFDGIIFQGQSLKIRRPHDYQPLPGMSENPSVYVPGVVSTVVPD |
| | | SAHKLFIGGLPNYLNDDQVKELLTSFGPLKAFNLVKDSATGLSKGYAFCEY |
| | | VDINVTDQAIAGLNGMQLGDKKLLVQRASVGAKNATLVSPPSTINQTPVTL |
| | | QVPGLMSSQVQMGGHPTEVLCLMNMVLPEELLDDEEYEEIVEDVRDECSK |
| | | YGLVKSIEIPRPVDGVEVPGCGKIFVEFTSVFDCQKAMQGLTGRKFANRVVV |
| | | TKYCDPDSYHRRDFW |
| 183 | SF1 | MATGANATPLDFPSKKRKRSRWNQDTMEQKTVIPGMPTVIPPGLTREQERA |
| | | YIVQLQIEDLTRKLRTGDLGIPPNPEDRSPSPEPIYNSEGKRLNTREFRTRKKL |
| | | EEERHNLITEMVALNPDFKPPADYKPPATRVSDKVMIPQDEYPEINFVGLLIG |
| | | PRGNTLKNIEKECNAKIMIRGKGSVKEGKVGRKDGQMLPGEDEPLHALVTA |
| | | NTMENVKKAVEQIRNILKQGIETPEDQNDLRKMQLRELARLNGTLREDDNR |
| | | ILRPWQSSETRSITNTTVCTKCGGAGHIASDCKFQRPGDPQSAQDKARMDKE |
| | | YLSLMAELGEAPVPASVGSTSGPATTPLASAPRPAAPANNPPPPSLMSTTQSR |
| | | PPWMNSGPSESRPYHGMHGGGPGGPGGGPHSFPHPLPSLTGGHGGHPMQH |
| | | NPNGPPPPWMQPPPPPMNQGPHPPGHHGPPPMDQYLGSTPVGSGVYRLHQG |
| | | KGMMPPPPMGMMPPPPPPPSGQPPPPPSGPLPPWQQQQQQPPPPPPPSSSMAS |
| | | STPLPWQQNTTTTTTSAGTGSIPPWQQQQAAAAASPGAPQMQGNPTMVPLP |
| | | PGVQPPLPPGAPPPPPPPPPGSAGMMYAPPPPPPPPMDPSNFVTMMGMGVAG |
| | | MPPFGMPPAPPPPPPQN |
| 184 | SF3B1 | MAKIAKTHEDIEAQIREIQGKKAALDEAQGVGLDSTGYYDQEIYGGSDSRFA |
| | | GYVTSIAATELEDDDDDYSSSTSLLGQKKPGYHAPVALLNDIPQSTEQYDPF |
| | | AEHRPPKIADREDEYKKHRRTMIISPERLDPFADGGKTPDPKMNARTYMDV |
| | | MREQHLTKEEREIRQQLAEKAKAGELKVVNGAAASQPPSKRKRRWDQTAD |
| | | QTPGATPKKLSSWDQAETPGHTPSLRWDETPGRAKGSETPGATPGSKIWDP |
| | | TPSHTPAGAATPGRGDTPGHATPGHGGATSSARKNRWDETPKTERDTPGHG |
| | | SGWAETPRTDRGGDSIGETPTPGASKRKSRWDETPASQMGGSTPVLTPGKTP |
| | | IGTPAMNMATPTPGHIMSMTPEQLQAWRWEREIDERNRPLSDEELDAMFPE |
| | | GYKVLPPPAGYVPIRTPARKLTATPTPLGGMTGFHMQTEDRTMKSVNDQPS |
| | | GNLPFLKPDDIQYFDKLLVDVDESTLSPEEQKERKIMKLLLKIKNGTPPMRK |
| | | AALRQITDKAREFGAGPLFNQILPLLMSPTLEDQERHLLVKVIDRILYKLDDL |
| | | VRPYVHKILVVIEPLLIDEDYYARVEGREIISNLAKAAGLATMISTMRPDIDN |
| | | MDEYVRNTTARAFAVVASALGIPSLLPFLKAVCKSKKSWQARHTGIKIVQQI |
| | | AILMGCAILPHLRSLVEIIEHGLVDEQQKVRTISALAIAALAEAATPYGIESFD |
| | | SVLKPLWKGIRQHRGKGLAAFLKAIGYLIPLMDAEYANYYTREVMLILIREF |
| | | QSPDEEMKKIVLKVVKQCCGTDGVEANYIKTEILPPFFKHFWQHRMALDRR |
| | | NYRQLVDTTVELANKVGAAEIISRIVDDLKDEAEQYRKMVMETIEKIMGNL |
| | | GAADIDHKLEEQLIDGILYAFQEQTTEDSVMLNGFGTVVNALGKRVKPYLP |
| | | QICGTVLWRLNNKSAKVRQQAADLISRTAVVMKTCQEEKLMGHLGVVLYE |
| | | YLGEEYPEVLGSILGALKAIVNVIGMHKMTPPIKDLLPRLTPILKNRHEKVQE |
| | | NCIDLVGRIADRGAEYVSAREWMRICFELLELLKAHKKAIRRATVNTFGYIA |
| | | KAIGPHDVLATLLNNLKVQERQNRVCTTVAIAIVAETCSPFTVLPALMNEYR |
| | | VPELNVQNGVLKSLSFLFEYIGEMGKDYIYAVTPLLEDALMDRDLVHRQTA |
| | | SAVVQHMSLGVYGFGCEDSLNHLLNYVWPNVFETSPHVIQAVMGALEGLR |
| | | VAIGPCRMLQYCLQGLFHPARKVRDVYWKIYNSIYIGSQDALIAHYPRIYND |
| | | DKNTYIRYELDYIL |

[0239] Table 8 shows the codon optimized DNA sequences for the splicing proteins from Table 7.

TABLE 8

| SEQ | | |
|---|---|---|
| ID | | |
| NO | ID | Sequence |
| 185 | RBM17 | atgtccctgtacgatgacctaggagtggagaccagtgactcaaaaacagaaggctggtccaa |
| | | aaacttcaaacttctgcagtctcagcttcaggtgaagaaggcagctctcactcaggcaaagag |
| | | ccaaaggacgaaacaaagtacagtcctcgccccagtcattgacctgaagcgaggtggctcct |
| | | cagatgaccggcaaattgtggacactccaccgcatgtagcagctgggctgaaggatcctgttc |
| | | ccagtgggttttctgcaggggaagttctgattcccttagctgacgaatatgaccctatgtttccta |
| | | atgattatgagaaagtagtgaagcgccaaagagaggaacgacagagacagcgggagctgg |
| | | aaagacaaaaggaaatagaagaaagggaaaaaaggcgtaaagacagacatgaagcaagt |
| | | gggtttgcaaggagaccagatccagattctgatgaagatgaagattatgagcgagagaggag |
| | | gaaaagaagtatgggcggagctgccattgccccacccacttctctggtagagaaagacaaag |
| | | agttaccccgagattttccttatgaagaggactcaagacctcgatcacagtcttccaaagcagc |
| | | cattcctcccccagtgtacgaggaacaagacagaccgagatctccaaccggacctagcaact |
| | | ccttcctcgctaacatggggggcacggtggcgcacaagatcatgcagaagtacggcttccgg |
| | | gagggccagggtctggggaagcatgagcagggcctgagcactgccttgtcagtggagaag |
| | | accagcaagcgtggcggcaagatcatcgtgggcgacgccacagagaaagatgcatccaag |
| | | aagtcagattcaaatccgctgactgaaatacttaagtgtcctactaaagtggtcttactaaggaa |
| | | catggttggtgcgggagaggtggatgaagacttggaagttgaaaccaaggaagaatgtgaa |
| | | aaatatggcaaagttggaaaatgtgtgatatttgaaattcctggtgcccctgatgatgaagcagt |
| | | acggatatttttagaatttgagagagttgaatcagcaattaaagcggttgttgacttgaatggga |
| | | ggtattttggtggacgggtggtaaaagcatgtttctacaatttggacaaattcagggtcttggatt |
| | | tggcagaacaagtt |
| 186 | SF3B6 | atggcgatgcaagcggccaagagggcgaacattcgacttccacctgaagtaaatcggatatt |
| | | gtatataagaaatttgccatacaaaatcacagctgaagaaatgtatgatatatttgggaaatatg |
| | | gacctattcgtcaaatcagagtggggaacacacctgaaactagaggaacagcttatgtggtct |
| | | atgaggacatctttgatgccaagaatgcatgtgatcacctatcgggattcaatgtttgtaacagat |
| | | accttgtggttttgtactataatgccaacagggcatttcagaagatggacacaaagaagaagga |
| | | ggaacagttgaagcttctcaaggagaaatatggcatcaacacagatccaccaaaa |
| 187 | U2AF1 | atggcggagtatctggcctccatcttcggcaccgagaaagacaaagtcaactgttcattttattt |
| | | caaaattggagcatgtcgtcatggagacaggtgctctcggttgcacaataaaccgacgtttag |
| | | ccagaccattgccctcttgaacatttaccgtaaccctcaaaactcttcccagtctgctgacggttt |
| | | gcgctgtgccgtgagcgatgtggagatgcaggaacactatgatgagttttttgaggaggttttta |
| | | cagaaatggaggagaagtatggggaagtagaggagatgaacgtctgtgacaacctgggag |
| | | accacctggtggggaacgtgtacgtcaagtttcgccgtgaggaagatgcggaaaaggctgtg |
| | | attgacttgaataaccgttggtttaatggacagccgCtccacgccgagctgtcacccgtgacg |
| | | gacttcagagaagcctgctgccgtcagtatgagatgggagaatgcacacgaggcggcttctg |
| | | caacttcatgcatttgaagcccatttccagagagctgcggcgggagctgtatggccgccgtcg |
| | | caagaagcatagatcaagatcccgatcccgggagcgtcgttctcggtctagagaccgtggtc |
| | | gtggcggtggcggtggcggtggtggaggtggcggcggacgggagcgtgacaggaggcg |
| | | gtcgagagatcgtgaaagatctgggcgattc |
| 188 | U2AF2 | atgtcggacttcgacgagttcgagcggcagctcaacgagaataaacaagagcgggacaag |
| | | gagaaccggcatcggaagcgcagccacagccgctctcggagccgggaccgcaaacgccg |
| | | gagccggagccgcgaccggcgcaaccgggaccagcggagcgcctcccgggacaggcg |
| | | acgacgcagcaaacctttgaccagaggcgctaaagaggagcacggtggactgattcgttcc |
| | | ccccgccacgagaagaagaagaaggtccgtaaatactgggacgtgccacccccaggctttg |
| | | agcacatcaccccaatgcagtacaaggccatgcaagctgcgggtcagattccagccactgct |
| | | cttctccccaccatgacccctgacggtctggctgtgaccccaacgccggtgcccgtggtcgg |
| | | gagccagatgaccagacaagcccggcgcctctacgtgggcaacatcccctttggcatcactg |
| | | aggaggccatgatggatttcttcaacgcccagatgcgcctgggggggctgacccaggcccc |
| | | tggcaacccagtgttggctgtgcagattaaccaggacaagaattttgcctttttggagttccgct |
| | | cagtggacgagactacccaggctatggcctttgatggcatcatcttccagggccagtcactaa |
| | | agatccgcaggcctcacgactaccagccgcttcctggcatgtcagagaacccctccgtctatg |
| | | tgcctggggttgtgtccactgtggtccccgactctgcccacaagctgttcatcgggggcttacc |
| | | caactacctgaacgatgaccaggtcaaagagctgctgacatcctttgggcccctcaaggcctt |
| | | caacctggtcaaggacagtgccacggggctctccaagggctacgccttctgtgagtacgtgg |
| | | acatcaacgtcacggatcaggccattgcggggctgaacggcatgcagctgggggataagaa |
| | | gctgctggtccagagggcgagtgtgggagccaagaatgccacgctggtgagccccccgag |
| | | caccatcaatcagacgcctgtgaccctgcaagtgccgggcttgatgagctcccaggtgcaga |
| | | tgggcggccacccgactgaggtcctgtgcctcatgaacatggtgctgcctgaggagctgctg |
| | | gacgacgaggagtatgaggagatcgtggaggacgtgcgggacgagtgcagcaagtacgg |
| | | gcttgtcaagtccatcgagatcccccggcctgtggacggcgtcgaggtgcccggctgcgga |
| | | aagatctttgtggagttcacctctgtgtttgactgccagaaagccatgcagggcctgacgggcc |
| | | gcaagttcgccaacagagtggttgtcacaaaatactgtgaccccgactcttatcaccgccggg |
| | | acttctgg |
| 189 | SF1 | atggccaccggcgccaacgccacccccctggacttccccagcaagaagagaaagagaagc |
| | | agatggaaccaggacaccatggagcagaagaccgtgatccccggcatgcccaccgtgatc |
| | | ccccccggcctgaccagagagcaggagagagcctacatcgtgcagctgcagatcgaggac |
| | | ctgaccagaaagctgagaaccggcgacctgggcatcccccccaaccccgaggacagaag |
| | | ccccagccccgagcccatctacaacagcgagggcaagagactgaacaccagagagttcag |
| | | aaccagaaagaagctggaggaggagagacacaacctgatcaccgagatggtggccctgaa |
| | | ccccgacttcaagccccccgccgactacaagccccccgccaccagagtgagcgacaaggt |
| | | gatgatcccccaggacgagtaccccgagatcaacttcgtgggcctgctgatcggccccaga |
| | | ggcaacaccctgaagaacatcgagaaggagtgcaacgccaagatcatgatcagaggcaag |
| | | ggcagcgtgaaggagggcaaggtgggcagaaaggacggccagatgctgcccggcgagg |
| | | acgagcccctgcacgccctggtgaccgccaacaccatggagaacgtgaagaaggccgtgg |
| | | agcagatcagaaacatcctgaagcagggcatcgagacccccgaggaccagaacgacctga |
| | | gaaagatgcagctgagagagctggccagactgaacggcaccctgagagaggacgacaac |
| | | agaatcctgagaccctggcagagcagcgagaccagaagcatcaccaacaccaccgtgtgc |
| | | accaagtgcggcggcgccggccacatcgccagcgactgcaagttccagagacccggcga |
| | | cccccagagcgcccaggacaaggccagaatggacaaggagtacctgagcctgatggccg |
| | | agctgggcgaggcccccgtgcccgccagcgtgggcagcaccagcggccccgccaccacc |
| | | cccctggccagcgcccccagacccgccgcccccgccaacaacccccccccccccagcct |
| | | gatgagcaccacccagagcagacccccctggatgaacagcggccccagcgagagcagac |
| | | cctaccacggcatgcacggcggcggccccggcggccccggcggcggcccccacagcttc |
| | | ccccaccccctgcccagcctgaccggcggccacggcggccaccccatgcagcacaaccc |
| | | caacggccccccccccccctggatgcagcccccccccccccccatgaaccagggccccca |
| | | cccccccggccaccacggccccccccccatggaccagtacctgggcagcacccccgtggg |
| | | cagcggcgtgtacagactgcaccagggcaagggcatgatgccccccccccccatgggcat |
| | | gatgcccccccccccccccccccccagcggccagcccccccccccccccagcggccccct |
| | | gcccccctggcagcagcagcagcagcagcccccccccccccccccccccagcagcagca |
| | | tggccagcagcacccccctgccctggcagcagaacaccaccaccaccaccaccagcgccg |
| | | gcaccggcagcatccccccctggcagcagcagcaggccgccgccgccgccagccccgg |
| | | cgccccccagatgcagggcaaccccaccatggtgcccctgccccccggcgtgcagccccc |
| | | cctgccccccggcgcccccccccccccccccccccccccccccggcagcgccggcatgat |
| | | gtacgccccccccccccccccccccccccccatggaccccagcaacttcgtgaccatgatg |
| | | ggcatgggcgtggccggcatgccccccttcggcatgccccccgccccccccccccccccc |
| | | ccccagaac |
| 190 | SF3B1 | atggcgaagatcgccaagactcacgaagatattgaagcacagattcgagaaattcaaggcaa |
| | | gaaggcagctcttgatgaagctcaaggagtgggcctcgattctacaggttattatgaccagga |
| | | aatttatggtggaagtgacagcagatttgctggatacgtgacatcaattgctgcaactgaacttg |
| | | aagatgatgacgatgactattcatcatctacgagtttgcttggtcagaagaagccaggatatcat |
| | | gcccctgtggcattgcttaatgatataccacagtcaacagaacagtatgatccatttgctgagca |
| | | cagacctccaaagattgcagaccgggaagatgaatacaaaaagcataggcggaccatgata |
| | | atttccccagagcgtcttgatccttttgcagatggagggaaaacccctgatcctaaaatgaatgc |
| | | taggacttacatggatgtaatgcgagaacaacacttgactaaagaagaacgagaaattaggca |
| | | acagctagcagaaaaagctaaagctggagaactaaaagtcgtcaatggagcagcagcgtcc |
| | | cagcctccatcaaaacgaaaacggcgttgggatcaaacagctgatcagactcctggtgccac |
| | | tcccaaaaaactatcaagttgggatcaggcagagacccctgggcatactccttccttaagatg |
| | | ggatgagacaccaggtcgtgcaaagggaagcgagactcctggagcaaccccaggctcaaa |
| | | aatatgggatcctacacctagccacacaccagcgggagctgctactcctggacgaggtgata |
| | | caccaggccatgcgacaccaggccatggaggcgcaacttccagtgctcgtaaaaacagatg |
| | | ggatgaaacccccaaaacagagagagatactcctgggcatggaagtggatgggctgagact |
| | | cctcgaacagatcgaggtggagattctattggtgaaacaccgactcctggagccagtaaaag |
| | | aaaatcacggtgggatgaaacaccagctagtcagatgggtggaagcactccagttctgaccc |
| | | ctggaaagacaccaattggcacaccagccatgaacatggctacccctactccaggtcacata |
| | | atgagtatgactcctgaacagcttcaggcttggcggtgggaaagagaaattgatgagagaaat |
| | | cgcccactttctgatgaggaattagatgctatgttcccagaaggatataaggtacttcctcctcc |
| | | agctggttatgttcctattcgaactccagctcgaaagctgacagctactccaacacctttgggtg |
| | | gtatgactggtttccacatgcaaactgaagatcgaactatgaaaagtgttaatgaccagccatct |
| | | ggaaatcttccatttttaaaacctgatgatattcaatactttgataaactattggttgatgttgatgaa |
| | | tcaacacttagtccagaagagcaaaaagagagaaaaataatgaagttgcttttaaaaattaaga |
| | | atggaacaccaccaatgagaaaggctgcattgcgtcagattactgataaagctcgtgaatttgg |
| | | agctggtcctttgtttaatcagattcttcctctgctgatgtctcctacacttgaggatcaagagcgt |
| | | catttacttgtgaaagttattgataggatactgtacaaacttgatgacttagttcgtccatatgtgca |
| | | taagatcctcgtggtcattgaaccgctattgattgatgaagattactatgctagagtggaaggcc |
| | | gagagatcatttctaatttggcaaaggctgctggtctggctactatgatctctaccatgagacct |
| | | gatatagataacatggatgagtatgtccgtaacacaacagctagagcttttgctgttgtagcctct |
| | | gccctgggcattccttctttattgcccttcttaaaagctgtgtgcaaaagcaagaagtcctggca |
| | | agcgagacacactggtattaagattgtacaacagatagctattcttatgggctgtgccatcttgc |
| | | cacatcttagaagtttagttgaaatcattgaacatggtcttgtggatgagcagcagaaagttcgg |
| | | accatcagtgctttggccattgctgccttggctgaagcagcaactccttatggtatcgaatctttt |
| | | gattctgtgttaaagcctttatggaagggtatccgccaacacagaggaaagggtttggctgcttt |
| | | cttgaaggctattgggtatcttattcctcttatggatgcagaatatgccaactactatactagagaa |
| | | gtgatgttaatccttattcgagaattccagtctcctgatgaggaaatgaaaaaaattgtgctgaag |
| | | gtggtaaaacagtgttgtgggacagatggtgtagaagcaaactacattaaaacagagattcttc |
| | | ctcccttttttaaacacttctggcagcacaggatggctttggatagaagaaattaccgacagtta |
| | | gttgatactactgtggagttggcaaacaaagtaggtgcagcagaaattatatccaggattgtgg |
| | | atgatctgaaagatgaagccgaacagtacagaaaaatggtgatggagacaattgagaaaatt |
| | | atgggtaatttgggagcagcagatattgatcataaacttgaagaacaactgattgatggtattctt |
| | | tatgctttccaagaacagactacagaggactcagtaatgttgaacggctttggcacagtggtta |
| | | atgctcttggcaaacgagtcaaaccatacttgcctcagatctgtggtacagttttgtggcgtttaa |
| | | ataacaaatctgctaaagttaggcaacaggcagctgacttgatttctcgaactgctgttgtcatg |
| | | aagacttgtcaagaggaaaaattgatgggacacttgggtgttgtattgtatgagtatttgggtga |
| | | agagtaccctgaagtattgggcagcattcttggagcactgaaggccattgtaaatgtcataggt |
| | | atgcataagatgactccaccaattaaagatctgctgcctagactcacccccatcttaaagaaca |
| | | gacatgaaaaagtacaagagaattgtattgatcttgttggtcgtattgctgacaggggagctga |
| | | atatgtatctgcaagagagtggatgaggatttgctttgagcttttagagctcttaaaagcccaca |
| | | aaaaggctattcgtagagccacagtcaacacatttggttatattgcaaaggccattggccctcat |
| | | gatgtattggctacacttctgaacaacctcaaagttcaagaaaggcagaacagagtttgtacca |
| | | ctgtagcaatagctattgttgcagaaacatgttcaccctttacagtactccctgccttaatgaatg |
| | | aatacagagttcctgaactgaatgttcaaaatggagtgttaaaatcgctttccttcttgtttgaatat |
| | | attggtgaaatgggaaaagactacatttatgccgtaacaccgttacttgaagatgctttaatggat |
| | | agagaccttgtacacagacagacggctagtgcagtggtacagcacatgtcacttggggtttat |
| | | ggatttggttgtgaagattcgctgaatcacttgttgaactatgtatggcccaatgtatttgagacat |
| | | ctcctcatgtaattcaggcagttatgggagccctagagggcctgagagttgctattggaccatg |
| | | tagaatgttgcaatattgtttacagggtctgtttcacccagcccggaaagtcagagatgtatattg |
| | | gaaaatttacaactccatctacattggttcccaggacgctctcatagcacattacccaagaatct |
| | | acaacgatgataagaacacctatattcgttatgaacttgactatatctta |

[0240] Table 9 shows single, double, triple, and quadruple Cas7-11 mutations.

TABLE 9

| | | Mutation | Mutation | Mutation | Mutation |
|---|---|---|---|---|---|
| ID | Mutants | #1 | #2 | #3 | #4 |
| pDF0948 | Cas711_D1580R | D1580R | — | — | — |
| | (pDF0506 based) Singlemutant | | | | |
| pDF0949 | Cas711_D1580R_D988K | D1580R | D988K | — | — |
| | (pDF0506 based) Doublemutant | | | | |
| pDF0950 | Cas711_D1580R_D988K_D981K | D1580R | D988K | D981K | — |
| | (pDF0506 based) Triplemutant | | | | |
| pDF0951 | Cas711_D1580R_D988K_D981K_Y312K | D1580R | D988K | D981K | Y312K |
| | (pDF0506 based) Quadruplemutant | | | | |
| pDF0989 | Cas711_D1580R_D988K_Y312K | D1580R | D988K | — | Y312K |
| | (pDF0506 based) new_triplemutant | | | | |
| pDF0995 | Cas711_S1006-GGGS- | D1580R | D988K | — | Y312K |
| | R1294_D1580R_D988K_Y312K | | | | |

[0241] Table 10 shows the amino acid sequences of Cas7-11 mutants from Table 9.

TABLE 10

| SEQ | | |
|---|---|---|
| ID | | |
| NO | ID | Sequence |
| 191 | Cas711_D1580R | MKRTADGSEFESPKKKRKVTTTMKISIEFLEPFRMTKWQES |
| | (pDF0506 based) | TRRNKNNKEFVRGQAFARWHRNKKDNTKGRPYITGTLLR |
| | Singlemutant | SAVIRSAENLLTLSDGKISEKTCCPGKFDTEDKDRLLQLRQ |
| | | RSTLRWTDKNPCPDNAETYCPFCELLGRSGNDGKKAEKKD |
| | | WRFRIHFGNLSLPGKPDFDGPKAIGSQRVLNRVDFKSGKA |
| | | HDFFKAYEVDHTRFPRFEGEITIDNKVSAEARKLLCDSLKF |
| | | TDRLCGALCVIRFDEYTPAADSGKQTENVQAEPNANLAEK |
| | | TAEQIISILDDNKKTEYTRLLADAIRSLRRSSKLVAGLPKDH |
| | | DGKDDHYLWDIGKKKKDENSVTIRQILTTSADTKELKNAG |
| | | KWREFCEKLGEALYLKSKDMSGGLKITRRILGDAEFHGKP |
| | | DRLEKSRSVSIGSVLKETVVCGELVAKTPFFFGAIDEDAKQ |
| | | TDLQVLLTPDNKYRLPRSAVRGILRRDLQTYFDSPCNAELG |
| | | GRPCMCKTCRIMRGITVMDARSEYNAPPEIRHRTRINPFTG |
| | | TVAEGALFNMEVAPEGIVFPFQLRYRGSEDGLPDALKTVL |
| | | KWWAEGQAFMSGAASTGKGRFRMENAKYETLDLSDENQ |
| | | RNDYLKNWGWRDEKGLEELKKRLNSGLPEPGNYRDPKW |
| | | HEINVSIEMASPFINGDPIRAAVDKRGTDVVTFVKYKAEGE |
| | | EAKPVCAYKAESFRGVIRSAVARIHMEDGVPLTELTHSDCE |
| | | CLLCQIFGSEYEAGKIRFEDLVFESDPEPVTFDHVAIDRFTG |
| | | GAADKKKFDDSPLPGSPARPLMLKGSFWIRRDVLEDEEYC |
| | | KALGKALADVNNGLYPLGGKSAIGYGQVKSLGIKGDDKRI |
| | | SRLMNPAFDETDVAVPEKPKTDAEVRIEAEKVYYPHYFVE |
| | | PHKKVEREEKPCGHQKFHEGRLTGKIRCKLITKTPLIVPDTS |
| | | NDDFFRPADKEARKEKDEYHKSYAFFRLHKQIMIPGSELRG |
| | | MVSSVYETVTNSCFRIFDETKRLSWRMDADHQNVLQDFLP |
| | | GRVTADGKHIQKFSETARVPFYDKTQKHFDILDEQEIAGEK |
| | | PVRMWVKRFIKRLSLVDPAKHPQKKQDNKWKRRKEGIAT |
| | | FIEQKNGSYYFNVVTNNGCTSFHLWHKPDNFDQEKLEGIQ |
| | | NGEKLDCWVRDSRYQKAFQEIPENDPDGWECKEGYLHVV |
| | | GPSKVEFSDKKGDVINNFQGTLPSVPNDWKTIRTNDFKNR |
| | | KRKNEPVFCCEDDKGNYYTMAKYCETFFFDLKENEEYEIP |
| | | EKARIKYKELLRVYNNNPQAVPESVFQSRVARENVEKLKS |
| | | GDLVYFKHNEKYVEDIVPVRISRTVDDRMIGKRMSADLRP |
| | | CHGDWVEDGDLSALNAYPEKRLLLRHPKGLCPACRLFGT |
| | | GSYKGRVRFGFASLENDPEWLIPGKNPGDPFHGGPVMLSL |
| | | LERPRPTWSIPGSDNKFKVPGRKFYVHHHAWKTIKDGNHP |
| | | TTGKAIEQSPNNRTVEALAGGNSFSFEIAFENLKEWELGLLI |
| | | HSLQLEKGLAHKLGMAKSMGFGSVEIDVESVRLRKDWKQ |
| | | WRNGNSEIPNWLGKGFAKLKEWFRDELDFIENLKKLLWFP |
| | | EGDQAPRVCYPMLRKKDDPNGNSGYEELKRGEFKKEDRQ |
| | | KKLTTPWTPWAKRTADGSEFESPKKKRKV* |
| 192 | Cas711_D1580R_ | MKRTADGSEFESPKKKRKVTTTMKISIEFLEPFRMTKWQES |
| | D988K | TRRNKNNKEFVRGQAFARWHRNKKDNTKGRPYITGTLLR |
| | (pDF0506 based) | SAVIRSAENLLTLSDGKISEKTCCPGKFDTEDKDRLLQLRQ |
| | Doublemutant | RSTLRWTDKNPCPDNAETYCPFCELLGRSGNDGKKAEKKD |
| | | WRFRIHFGNLSLPGKPDFDGPKAIGSQRVLNRVDFKSGKA |
| | | HDFFKAYEVDHTRFPRFEGEITIDNKVSAEARKLLCDSLKF |
| | | TDRLCGALCVIRFDEYTPAADSGKQTENVQAEPNANLAEK |
| | | TAEQIISILDDNKKTEYTRLLADAIRSLRRSSKLVAGLPKDH |
| | | DGKDDHYLWDIGKKKKDENSVTIRQILTTSADTKELKNAG |
| | | KWREFCEKLGEALYLKSKDMSGGLKITRRILGDAEFHGKP |
| | | DRLEKSRSVSIGSVLKETVVCGELVAKTPFFFGAIDEDAKQ |
| | | TDLQVLLTPDNKYRLPRSAVRGILRRDLQTYFDSPCNAELG |
| | | GRPCMCKTCRIMRGITVMDARSEYNAPPEIRHRTRINPFTG |
| | | TVAEGALFNMEVAPEGIVFPFQLRYRGSEDGLPDALKTVL |
| | | KWWAEGQAFMSGAASTGKGRFRMENAKYETLDLSDENQ |
| | | RNDYLKNWGWRDEKGLEELKKRLNSGLPEPGNYRDPKW |
| | | HEINVSIEMASPFINGDPIRAAVDKRGTDVVTFVKYKAEGE |
| | | EAKPVCAYKAESFRGVIRSAVARIHMEDGVPLTELTHSDCE |
| | | CLLCQIFGSEYEAGKIRFEDLVFESDPEPVTFDHVAIDRFTG |
| | | GAADKKKFDDSPLPGSPARPLMLKGSFWIRRDVLEDEEYC |
| | | KALGKALADVNNGLYPLGGKSAIGYGQVKSLGIKGDDKRI |
| | | SRLMNPAFDETDVAVPEKPKTDAEVRIEAEKVYYPHYFVE |
| | | PHKKVEREEKPCGHQKFHEGRLTGKIRCKLITKTPLIVPDTS |
| | | NDDFFRPADKEARKEKDEYHKSYAFFRLHKQIMIPGSELRG |
| | | MVSSVYETVTNSCFRIFDETKRLSWRMDADHQNVLQKFLP |
| | | GRVTADGKHIQKFSETARVPFYDKTQKHFDILDEQEIAGEK |
| | | PVRMWVKRFIKRLSLVDPAKHPQKKQDNKWKRRKEGIAT |
| | | FIEQKNGSYYFNVVTNNGCTSFHLWHKPDNFDQEKLEGIQ |
| | | NGEKLDCWVRDSRYQKAFQEIPENDPDGWECKEGYLHVV |
| | | GPSKVEFSDKKGDVINNFQGTLPSVPNDWKTIRTNDFKNR |
| | | KRKNEPVFCCEDDKGNYYTMAKYCETFFFDLKENEEYEIP |
| | | EKARIKYKELLRVYNNNPQAVPESVFQSRVARENVEKLKS |
| | | GDLVYFKHNEKYVEDIVPVRISRTVDDRMIGKRMSADLRP |
| | | CHGDWVEDGDLSALNAYPEKRLLLRHPKGLCPACRLFGT |
| | | GSYKGRVRFGFASLENDPEWLIPGKNPGDPFHGGPVMLSL |
| | | LERPRPTWSIPGSDNKFKVPGRKFYVHHHAWKTIKDGNHP |
| | | TTGKAIEQSPNNRTVEALAGGNSFSFEIAFENLKEWELGLLI |
| | | HSLQLEKGLAHKLGMAKSMGFGSVEIDVESVRLRKDWKQ |
| | | WRNGNSEIPNWLGKGFAKLKEWFRDELDFIENLKKLLWFP |
| | | EGDQAPRVCYPMLRKKDDPNGNSGYEELKRGEFKKEDRQ |
| | | KKLTTPWTPWAKRTADGSEFESPKKKRKV* |
| 193 | Cas711_D1580R_ | MKRTADGSEFESPKKKRKVTTTMKISIEFLEPFRMTKWQES |
| | D988K_D981K | TRRNKNNKEFVRGQAFARWHRNKKDNTKGRPYITGTLLR |
| | (pDF0506 based) | SAVIRSAENLLTLSDGKISEKTCCPGKFDTEDKDRLLQLRQ |
| | Triplemutant | RSTLRWTDKNPCPDNAETYCPFCELLGRSGNDGKKAEKKD |
| | | WRFRIHFGNLSLPGKPDFDGPKAIGSQRVLNRVDFKSGKA |
| | | HDFFKAYEVDHTRFPRFEGEITIDNKVSAEARKLLCDSLKF |
| | | TDRLCGALCVIRFDEYTPAADSGKQTENVQAEPNANLAEK |
| | | TAEQIISILDDNKKTEYTRLLADAIRSLRRSSKLVAGLPKDH |
| | | DGKDDHYLWDIGKKKKDENSVTIRQILTTSADTKELKNAG |
| | | KWREFCEKLGEALYLKSKDMSGGLKITRRILGDAEFHGKP |
| | | DRLEKSRSVSIGSVLKETVVCGELVAKTPFFFGAIDEDAKQ |
| | | TDLQVLLTPDNKYRLPRSAVRGILRRDLQTYFDSPCNAELG |
| | | GRPCMCKTCRIMRGITVMDARSEYNAPPEIRHRTRINPFTG |
| | | TVAEGALFNMEVAPEGIVFPFQLRYRGSEDGLPDALKTVL |
| | | KWWAEGQAFMSGAASTGKGRFRMENAKYETLDLSDENQ |
| | | RNDYLKNWGWRDEKGLEELKKRLNSGLPEPGNYRDPKW |
| | | HEINVSIEMASPFINGDPIRAAVDKRGTDVVTFVKYKAEGE |
| | | EAKPVCAYKAESFRGVIRSAVARIHMEDGVPLTELTHSDCE |
| | | CLLCQIFGSEYEAGKIRFEDLVFESDPEPVTFDHVAIDRFTG |
| | | GAADKKKFDDSPLPGSPARPLMLKGSFWIRRDVLEDEEYC |
| | | KALGKALADVNNGLYPLGGKSAIGYGQVKSLGIKGDDKRI |
| | | SRLMNPAFDETDVAVPEKPKTDAEVRIEAEKVYYPHYFVE |
| | | PHKKVEREEKPCGHQKFHEGRLTGKIRCKLITKTPLIVPDTS |
| | | NDDFFRPADKEARKEKDEYHKSYAFFRLHKQIMIPGSELRG |
| | | MVSSVYETVTNSCFRIFDETKRLSWRMDAKHQNVLQKFLP |
| | | GRVTADGKHIQKFSETARVPFYDKTQKHFDILDEQEIAGEK |
| | | PVRMWVKRFIKRLSLVDPAKHPQKKQDNKWKRRKEGIAT |
| | | FIEQKNGSYYFNVVTNNGCTSFHLWHKPDNFDQEKLEGIQ |
| | | NGEKLDCWVRDSRYQKAFQEIPENDPDGWECKEGYLHVV |
| | | GPSKVEFSDKKGDVINNFQGTLPSVPNDWKTIRTNDFKNR |
| | | KRKNEPVFCCEDDKGNYYTMAKYCETFFFDLKENEEYEIP |
| | | EKARIKYKELLRVYNNNPQAVPESVFQSRVARENVEKLKS |
| | | GDLVYFKHNEKYVEDIVPVRISRTVDDRMIGKRMSADLRP |
| | | CHGDWVEDGDLSALNAYPEKRLLLRHPKGLCPACRLFGT |
| | | GSYKGRVRFGFASLENDPEWLIPGKNPGDPFHGGPVMLSL |
| | | LERPRPTWSIPGSDNKFKVPGRKFYVHHHAWKTIKDGNHP |
| | | TTGKAIEQSPNNRTVEALAGGNSFSFEIAFENLKEWELGLLI |
| | | HSLQLEKGLAHKLGMAKSMGFGSVEIDVESVRLRKDWKQ |
| | | WRNGNSEIPNWLGKGFAKLKEWFRDELDFIENLKKLLWFP |
| | | EGDQAPRVCYPMLRKKDDPNGNSGYEELKRGEFKKEDRQ |
| | | KKLTTPWTPWAKRTADGSEFESPKKKRKV* |
| 194 | Cas711_D1580R | MKRTADGSEFESPKKKRKVTTTMKISIEFLEPFRMTKWQES |
| | (pDF0506 based) | TRRNKNNKEFVRGQAFARWHRNKKDNTKGRPYITGTLLR |
| | Singlemutant | SAVIRSAENLLTLSDGKISEKTCCPGKFDTEDKDRLLQLRQ |
| | | RSTLRWTDKNPCPDNAETYCPFCELLGRSGNDGKKAEKKD |
| | | WRFRIHFGNLSLPGKPDFDGPKAIGSQRVLNRVDFKSGKA |
| | | HDFFKAYEVDHTRFPRFEGEITIDNKVSAEARKLLCDSLKF |
| | | TDRLCGALCVIRFDEYTPAADSGKQTENVQAEPNANLAEK |
| | | TAEQIISILDDNKKTEYTRLLADAIRSLRRSSKLVAGLPKDH |
| | | DGKDDHKLWDIGKKKKDENSVTIRQILTTSADTKELKNAG |
| | | KWREFCEKLGEALYLKSKDMSGGLKITRRILGDAEFHGKP |
| | | DRLEKSRSVSIGSVLKETVVCGELVAKTPFFFGAIDEDAKQ |
| | | TDLQVLLTPDNKYRLPRSAVRGILRRDLQTYFDSPCNAELG |
| | | GRPCMCKTCRIMRGITVMDARSEYNAPPEIRHRTRINPFTG |
| | | TVAEGALFNMEVAPEGIVFPFQLRYRGSEDGLPDALKTVL |
| | | KWWAEGQAFMSGAASTGKGRFRMENAKYETLDLSDENQ |
| | | RNDYLKNWGWRDEKGLEELKKRLNSGLPEPGNYRDPKW |
| | | HEINVSIEMASPFINGDPIRAAVDKRGTDVVTFVKYKAEGE |
| | | EAKPVCAYKAESFRGVIRSAVARIHMEDGVPLTELTHSDCE |
| | | CLLCQIFGSEYEAGKIRFEDLVFESDPEPVTFDHVAIDRFTG |
| | | GAADKKKFDDSPLPGSPARPLMLKGSFWIRRDVLEDEEYC |
| | | KALGKALADVNNGLYPLGGKSAIGYGQVKSLGIKGDDKRI |
| | | SRLMNPAFDETDVAVPEKPKTDAEVRIEAEKVYYPHYFVE |
| | | PHKKVEREEKPCGHQKFHEGRLTGKIRCKLITKTPLIVPDTS |
| | | NDDFFRPADKEARKEKDEYHKSYAFFRLHKQIMIPGSELRG |
| | | MVSSVYETVTNSCFRIFDETKRLSWRMDAKHQNVLQKFLP |
| | | GRVTADGKHIQKFSETARVPFYDKTQKHFDILDEQEIAGEK |
| | | PVRMWVKRFIKRLSLVDPAKHPQKKQDNKWKRRKEGIAT |
| | | FIEQKNGSYYFNVVTNNGCTSFHLWHKPDNFDQEKLEGIQ |
| | | NGEKLDCWVRDSRYQKAFQEIPENDPDGWECKEGYLHVV |
| | | GPSKVEFSDKKGDVINNFQGTLPSVPNDWKTIRTNDFKNR |
| | | KRKNEPVFCCEDDKGNYYTMAKYCETFFFDLKENEEYEIP |
| | | EKARIKYKELLRVYNNNPQAVPESVFQSRVARENVEKLKS |
| | | GDLVYFKHNEKYVEDIVPVRISRTVDDRMIGKRMSADLRP |
| | | CHGDWVEDGDLSALNAYPEKRLLLRHPKGLCPACRLFGT |
| | | GSYKGRVRFGFASLENDPEWLIPGKNPGDPFHGGPVMLSL |
| | | LERPRPTWSIPGSDNKFKVPGRKFYVHHHAWKTIKDGNHP |
| | | TTGKAIEQSPNNRTVEALAGGNSFSFEIAFENLKEWELGLLI |
| | | HSLQLEKGLAHKLGMAKSMGFGSVEIDVESVRLRKDWKQ |
| | | WRNGNSEIPNWLGKGFAKLKEWFRDELDFIENLKKLLWFP |
| | | EGDQAPRVCYPMLRKKDDPNGNSGYEELKRGEFKKEDRQ |
| | | KKLTTPWTPWAKRTADGSEFESPKKKRKV* |
| 195 | Cas711_D1580R_ | MKRTADGSEFESPKKKRKVTTTMKISIEFLEPFRMTKWQES |
| | D988K | TRRNKNNKEFVRGQAFARWHRNKKDNTKGRPYITGTLLR |
| | (pDF0506 based) | SAVIRSAENLLTLSDGKISEKTCCPGKFDTEDKDRLLQLRQ |
| | Doublemutant | RSTLRWTDKNPCPDNAETYCPFCELLGRSGNDGKKAEKKD |
| | | WRFRIHFGNLSLPGKPDFDGPKAIGSQRVLNRVDFKSGKA |
| | | HDFFKAYEVDHTRFPRFEGEITIDNKVSAEARKLLCDSLKF |
| | | TDRLCGALCVIRFDEYTPAADSGKQTENVQAEPNANLAEK |
| | | TAEQIISILDDNKKTEYTRLLADAIRSLRRSSKLVAGLPKDH |
| | | DGKDDHKLWDIGKKKKDENSVTIRQILTTSADTKELKNAG |
| | | KWREFCEKLGEALYLKSKDMSGGLKITRRILGDAEFHGKP |
| | | DRLEKSRSVSIGSVLKETVVCGELVAKTPFFFGAIDEDAKQ |
| | | TDLQVLLTPDNKYRLPRSAVRGILRRDLQTYFDSPCNAELG |
| | | GRPCMCKTCRIMRGITVMDARSEYNAPPEIRHRTRINPFTG |
| | | TVAEGALFNMEVAPEGIVFPFQLRYRGSEDGLPDALKTVL |
| | | KWWAEGQAFMSGAASTGKGRFRMENAKYETLDLSDENQ |
| | | RNDYLKNWGWRDEKGLEELKKRLNSGLPEPGNYRDPKW |
| | | HEINVSIEMASPFINGDPIRAAVDKRGTDVVTFVKYKAEGE |
| | | EAKPVCAYKAESFRGVIRSAVARIHMEDGVPLTELTHSDCE |
| | | CLLCQIFGSEYEAGKIRFEDLVFESDPEPVTFDHVAIDRFTG |
| | | GAADKKKFDDSPLPGSPARPLMLKGSFWIRRDVLEDEEYC |
| | | KALGKALADVNNGLYPLGGKSAIGYGQVKSLGIKGDDKRI |
| | | SRLMNPAFDETDVAVPEKPKTDAEVRIEAEKVYYPHYFVE |
| | | PHKKVEREEKPCGHQKFHEGRLTGKIRCKLITKTPLIVPDTS |
| | | NDDFFRPADKEARKEKDEYHKSYAFFRLHKQIMIPGSELRG |
| | | MVSSVYETVTNSCFRIFDETKRLSWRMDADHQNVLQKFLP |
| | | GRVTADGKHIQKFSETARVPFYDKTQKHFDILDEQEIAGEK |
| | | PVRMWVKRFIKRLSLVDPAKHPQKKQDNKWKRRKEGIAT |
| | | FIEQKNGSYYFNVVTNNGCTSFHLWHKPDNFDQEKLEGIQ |
| | | NGEKLDCWVRDSRYQKAFQEIPENDPDGWECKEGYLHVV |
| | | GPSKVEFSDKKGDVINNFQGTLPSVPNDWKTIRTNDFKNR |
| | | KRKNEPVFCCEDDKGNYYTMAKYCETFFFDLKENEEYEIP |
| | | EKARIKYKELLRVYNNNPQAVPESVFQSRVARENVEKLKS |
| | | GDLVYFKHNEKYVEDIVPVRISRTVDDRMIGKRMSADLRP |
| | | CHGDWVEDGDLSALNAYPEKRLLLRHPKGLCPACRLFGT |
| | | GSYKGRVRFGFASLENDPEWLIPGKNPGDPFHGGPVMLSL |
| | | LERPRPTWSIPGSDNKFKVPGRKFYVHHHAWKTIKDGNHP |
| | | TTGKAIEQSPNNRTVEALAGGNSFSFEIAFENLKEWELGLLI |
| | | HSLQLEKGLAHKLGMAKSMGFGSVEIDVESVRLRKDWKQ |
| | | WRNGNSEIPNWLGKGFAKLKEWFRDELDFIENLKKLLWFP |
| | | EGDQAPRVCYPMLRKKDDPNGNSGYEELKRGEFKKEDRQ |
| | | KKLTTPWTPWAKRTADGSEFESPKKKRKV* |
| 196 | Cas711_D1580R_ | MKRTADGSEFESPKKKRKVTTTMKISIEFLEPFRMTKWQES |
| | D988K_D981K | TRRNKNNKEFVRGQAFARWHRNKKDNTKGRPYITGTLLR |
| | (pDF0506 based) | SAVIRSAENLLTLSDGKISEKTCCPGKFDTEDKDRLLQLRQ |
| | Triplemutant | RSTLRWTDKNPCPDNAETYCPFCELLGRSGNDGKKAEKKD |
| | | WRFRIHFGNLSLPGKPDFDGPKAIGSQRVLNRVDFKSGKA |
| | | HDFFKAYEVDHTRFPRFEGEITIDNKVSAEARKLLCDSLKF |
| | | TDRLCGALCVIRFDEYTPAADSGKQTENVQAEPNANLAEK |
| | | TAEQIISILDDNKKTEYTRLLADAIRSLRRSSKLVAGLPKDH |
| | | DGKDDHKLWDIGKKKKDENSVTIRQILTTSADTKELKNAG |
| | | KWREFCEKLGEALYLKSKDMSGGLKITRRILGDAEFHGKP |
| | | DRLEKSRSVSIGSVLKETVVCGELVAKTPFFFGAIDEDAKQ |
| | | TDLQVLLTPDNKYRLPRSAVRGILRRDLQTYFDSPCNAELG |
| | | GRPCMCKTCRIMRGITVMDARSEYNAPPEIRHRTRINPFTG |
| | | TVAEGALFNMEVAPEGIVFPFQLRYRGSEDGLPDALKTVL |
| | | KWWAEGQAFMSGAASTGKGRFRMENAKYETLDLSDENQ |
| | | RNDYLKNWGWRDEKGLEELKKRLNSGLPEPGNYRDPKW |
| | | HEINVSIEMASPFINGDPIRAAVDKRGTDVVTFVKYKAEGE |
| | | EAKPVCAYKAESFRGVIRSAVARIHMEDGVPLTELTHSDCE |
| | | CLLCQIFGSEYEAGKIRFEDLVFESDPEPVTFDHVAIDRFTG |
| | | GAADKKKFDDSPLPGSPARPLMLKGSFWIRRDVLEDEEYC |
| | | KALGKALADVNNGLYPLGGKSAIGYGQVKSLGIKGDDKRI |
| | | SRLMNPAFDETDVAVPEKPKTDAEVRIEAEKVYYPHYFVE |
| | | PHKKVEREEKPCGHQKFHEGRLTGKIRCKLITKTPLIVPDTS |
| | | NDDFFRPADKEARKEKDEYHKSYAFFRLHKQIMIPGSELRG |
| | | MVSSVYETVTNSCFRIFDETKRLSWRMDADHQNVLQKFLP |
| | | GRVTADGKHIQKFSGGGSRTVDDRMIGKRMSADLRPCHG |
| | | DWVEDGDLSALNAYPEKRLLLRHPKGLCPACRLFGTGSYK |
| | | GRVRFGFASLENDPEWLIPGKNPGDPFHGGPVMLSLLERPR |
| | | PTWSIPGSDNKFKVPGRKFYVHHHAWKTIKDGNHPTTGKA |
| | | IEQSPNNRTVEALAGGNSFSFEIAFENLKEWELGLLIHSLQL |
| | | EKGLAHKLGMAKSMGFGSVEIDVESVRLRKDWKQWRNG |
| | | NSEIPNWLGKGFAKLKEWFRDELDFIENLKKLLWFPEGDQ |
| | | APRVCYPMLRKKDDPNGNSGYEELKRGEFKKEDRQKKLT |
| | | TPWTPWAKRTADGSEFESPKKKRKV* |

[0242] Table 11 shows the DNA sequences of the Cas7-11 mutants from Table 9.

TABLE 11

| SEQ | | |
|---|---|---|
| ID | | |
| NO | ID | Sequence |
| 197 | Cas711_D1580R | ATGaaacggacagccgacggaagcgagttcgagtcaccaaagaagaagcggaaagtc |
| | (pDF0506 based) | ACGACTACTATGAAGATTTCAATTGAATTCCTCGAGCCG |
| | Singlemutant | TTTCGGATGACCAAATGGCAGGAAAGCACTAGGCGAAA |
| | | CAAGAACAACAAGGAATTTGTTCGCGGCCAAGCTTTTGC |
| | | AAGATGGCATAGAAATAAGAAGGATAACACAAAAGGGC |
| | | GGCCTTACATAACTGGGACATTGCTGCGGTCCGCAGTAA |
| | | TTAGAAGCGCGGAAAACCTGCTGACATTGAGTGATGGG |
| | | AAAATTAGCGAAAAGACATGTTGTCCTGGGAAATTTGAT |
| | | ACGGAAGATAAAGACAGGTTGCTGCAATTGAGGCAGCG |
| | | GTCCACCCTTCGTTGGACCGATAAGAACCCCTGTCCAGA |
| | | TAACGCTGAAACTTACTGCCCGTTTTGCGAACTTCTCGG |
| | | GAGATCCGGTAACGATGGAAAGAAGGCTGAGAAGAAGG |
| | | ATTGGCGCTTTCGTATTCATTTTGGCAATCTTTCCCTTCC |
| | | AGGGAAGCCCGATTTCGACGGGCCAAAAGCTATAGGCA |
| | | GCCAACGGGTACTTAACAGGGTCGATTTCAAATCCGGTA |
| | | AGGCCCATGACTTCTTTAAGGCTTACGAAGTCGACCATA |
| | | CTAGGTTTCCCCGCTTCGAAGGGGAGATTACCATAGATA |
| | | ATAAAGTCAGCGCTGAAGCCAGGAAACTGCTCTGTGATT |
| | | CTCTCAAGTTTACGGATCGGCTGTGTGGAGCTCTGTGCG |
| | | TAATCAGGTTCGATGAATATACACCAGCAGCCGATAGTG |
| | | GGAAACAAACCGAAAATGTCCAAGCAGAACCGAATGCT |
| | | AATCTCGCTGAAAAGACCGCAGAGCAAATTATTAGCATT |
| | | CTGGACGATAATAAGAAAACCGAATATACCCGCCTGCTT |
| | | GCTGATGCTATTCGTTCACTCCGCCGCTCTAGTAAACTTG |
| | | TCGCTGGCTTGCCAAAGGATCATGACGGGAAGGATGAC |
| | | CATTACCTCTGGGATATCGGCAAGAAGAAGAAAGACGA |
| | | AAACTCTGTCACTATTAGGCAAATCCTTACGACCTCAGC |
| | | AGACACCAAGGAACTCAAGAATGCCGGAAAATGGAGAG |
| | | AATTCTGCGAGAAGCTGGGTGAAGCGCTGTACCTCAAG |
| | | AGTAAAGACATGAGTGGCGGCCTGAAAATTACTCGGAG |
| | | AATACTGGGCGATGCTGAATTCCATGGAAAGCCCGATCG |
| | | GCTTGAAAAGAGCCGGTCTGTGTCAATCGGATCTGTGTT |
| | | GAAAGAAACTGTGGTATGCGGCGAACTGGTCGCTAAAA |
| | | CGCCCTTCTTCTTCGGAGCGATAGACGAAGATGCAAAAC |
| | | AAACCgacCTGCAAGTACTCCTCACTCCCGATAACAAGTA |
| | | TAGACTGCCAAGAAGCGCCGTGCGAGGTATACTCCGTCG |
| | | AGATCTTCAAACCTATTTTGATAGCCCATGCAATGCTGA |
| | | GTTGGGTGGACGGCCATGCATGTGTAAGACGTGTAGGAT |
| | | TATGAGAGGGATCACGGTGATGGATGCGCGCAGTGAGT |
| | | ACAATGCCCCGCCAGAAATAAGGCATCGTACCCGCATTA |
| | | ATCCCTTCACAGGCACGGTTGCGGAAGGTGCCCTGTTTA |
| | | ATATGGAAGTAGCCCCCGAGGGGATTGTCTTTCCATTTC |
| | | AACTCCGGTACCGGGGCTCTGAAGATGGGCTGCCCGATG |
| | | CACTGAAAACGGTGTTGAAATGGTGGGCTGAGGGGCAG |
| | | GCATTCATGAGTGGCGCTGCCTCAACCGGGAAGGGCCG |
| | | ATTCCGGATGGAAAATGCTAAATATGAAACGCTGGATCT |
| | | GAGCGACGAGAATCAAAGGAATGACTATCTTAAGAATT |
| | | GGGGATGGCGTGACGAGAAGGGGCTCGAGGAACTGAAG |
| | | AAACGACTGAACTCAGGTCTGCCAGAGCCCGGTAATTAT |
| | | AGGGATCCAAAATGGCACGAGATTAACGTTTCCATTGAG |
| | | ATGGCAAGCCCTTTTATTAATGGCGACCCAATCCGCGCA |
| | | GCCGTGGACAAACGTGGTACAgatGTGGTTACCTTCGTTA |
| | | AGTATAAAGCTGAAGGGGAAGAGGCGAAACCCGTATGT |
| | | GCATACAAGGCCGAATCTTTTAGAGGGGTGATCAGAAG |
| | | TGCCGTGGCACGCATTCATATGGAAGATGGCGTCCCTTT |
| | | GACTGAGTTGACTCACAGTGACTGTGAATGTCTCCTGTG |
| | | CCAAATCTTTGGAAGTGAGTATGAAGCCGGCAAAATAA |
| | | GGTTTGAAGATCTCGTATTCGAAAGTGACCCGGAACCTG |
| | | TGACCTTCGATCATGTGGCCATCGATAGATTCACTGGCG |
| | | GTGCAGCTGATAAGAAGAAATTCGATGATTCCCCTCTGC |
| | | CCGGTAGCCCTGCAAGACCGCTCATGTTGAAAGGCTCCT |
| | | TCTGGATCCGCAGGGACGTTCTCGAGGACGAAGAGTACT |
| | | GTAAGGCACTCGGTAAGGCTCTTGCAGATGTGAATAATG |
| | | GCCTTTATCCCCTCGGTGGAAAGAGCGCCATCGGCTACG |
| | | GACAGGTCAAGAGTCTGGGTATAAAGGGAGATGATAAG |
| | | AGGATTTCTCGCCTCATGAATCCTGCCTTTGATGAGACA |
| | | GATGTAGCCGTTCCAGAAAAGCCCAAAACTGATGCCGA |
| | | GGTTCGCATCGAGGCAGAGAAAGTATATTACCCACACTA |
| | | TTTCGTCGAACCCCATAAGAAGGTGGAACGCGAGGAGA |
| | | AACCCTGTGGTCATCAAAAGTTCCACGAGGGGCGACTG |
| | | ACAGGTAAAATTCGGTGTAAGCTCATTACCAAGACACCC |
| | | CTCATCGTCCCAGATACTAGTAATGACGATTTCTTCAGA |
| | | CCTGCGGATAAAGAAGCTCGGAAGGAAAAGGACGAATA |
| | | TCATAAATCATATGCTTTCTTCAGACTTCATAAACAAAT |
| | | CATGATTCCCGGGAGCGAATTGAGAGGAATGGTGAGTA |
| | | GTGTCTACGAAACTGTGACAAATTCTTGCTTCAGGATAT |
| | | TTGATGAGACTAAACGGTTGTCATGGCGGATGGATGCTG |
| | | ATCACCAGAATGTGCTGCAAGACTTTCTCCCAGGTCGAG |
| | | TGACCGCCGATGGGAAACATATACAAAAGTTTTCCGAA |
| | | ACTGCAAGGGTGCCTTTCTATGACAAAACGCAGAAACAT |
| | | TTTGACATTCTTGATGAGCAAGAAATTGCTGGTGAGAAA |
| | | CCTGTTCGGATGTGGGTCAAGCGTTTTATTAAACGACTG |
| | | AGCCTCGTTGATCCTGCTAAACACCCCCAGAAGAAACAA |
| | | GACAATAAATGGAAAAGACGCAAAGAAGGCATCGCCAC |
| | | ATTTATAGAGCAAAAGAATGGCTCTTATTATTTTAACGT |
| | | GGTCACCAATAATGGCTGCACTTCTTTCCACTTGTGGCA |
| | | TAAACCTGACAATTTTGACCAGGAGAAACTCGAAGGCA |
| | | TACAGAATGGTGAGAAACTGGATTGCTGGGTAAGAGAT |
| | | AGTAGATACCAAAAGGCCTTTCAAGAGATACCCGAGAA |
| | | CGACCCAGACGGATGGGAGTGTAAAGAGGGCTACCTTC |
| | | ATGTCGTCGGCCCCAGCAAAGTAGAGTTTAGTGACAAG |
| | | AAAGGGGATGTGATCAATAACTTTCAAGGAACACTCCC |
| | | ATCAGTTCCCAACGACTGGAAAACAATTAGGACGAACG |
| | | ATTTTAAGAATAGGAAAAGGAAGAATGAACCTGTGTTTT |
| | | GTTGTGAGGATGATAAGGGCAATTACTATACCATGGCTA |
| | | AATATTGCGAAACCTTCTTCTTCGATCTGAAGGAGAACG |
| | | AGGAATACGAGATCCCCGAGAAAGCAAGAATCAAATAC |
| | | AAAGAACTGCTCAGGGTCTATAACAACAATCCTCAAGC |
| | | AGTGCCGGAGAGCGTATTTCAGTCTAGAGTTGCCCGGGA |
| | | AAACGTGGAAAAGCTGAAGTCCGGAGATCTTGTGTATTT |
| | | CAAACATAATGAAAAGTACGTAGAGGACATCGTCCCAG |
| | | TGCGGATTTCCCGAACTGTAGACGATAGGATGATCGGCA |
| | | AACGTATGAGCGCCGATCTGCGGCCGTGCCATGGAGATT |
| | | GGGTGGAAGATGGTGATCTCAGTGCCTTGAATGCATATC |
| | | CCGAGAAAAGACTCCTCTTGCGCCACCCCAAAGGACTCT |
| | | GCCCTGCTTGCCGGCTCTTTGGAACCGGATCTTACAAGG |
| | | GCAGAGTCAGGTTTGGATTCGCGTCACTCGAAAACGATC |
| | | CGGAGTGGCTGATCCCAGGCAAGAATCCCGGCGATCCG |
| | | TTTCACGGCGGGCCGGTGATGCTCTCATTGTTGGAACGG |
| | | CCTCGCCCGACTTGGAGTATACCGGGATCCGACAATAAG |
| | | TTTAAAGTGCCTGGCAGAAAGTTTTACGTCCACCACCAC |
| | | GCCTGGAAAACCATTAAGGACGGGAACCATCCCACAAC |
| | | AGGCAAAGCTATTGAACAAAGCCCTAATAACCGCACTG |
| | | TAGAAGCTCTCGCCGGCGGGAATTCCTTTAGCTTCGAAA |
| | | TTGCCTTTGAGAACCTGAAAGAATGGGAGCTGGGTTTGC |
| | | TCATCCACAGCCTGCAACTCGAAAAGGGTCTGGCGCATA |
| | | AACTTGGAATGGCAAAGTCTATGGGATTTGGTTCAGTTG |
| | | AAATTGACGTCGAATCAGTGCGCCTGAGAAAAGATTGG |
| | | AAGCAATGGCGGAATGGCAATTCCGAAATTCCCAACTG |
| | | GTTGGGAAAAGGATTTGCTAAACTGAAGGAATGGTTCC |
| | | GGGACGAGCTCGATTTTATAGAAAATCTTAAGAAACTTC |
| | | TTTGGTTTCCTGAGGGCGACCAAGCACCCCGGGTTTGCT |
| | | ACCCCATGCTGCGAAAGAAGGACGATCCTAATGGGAAT |
| | | AGCGGTTACGAAGAACTCAAAAGAGGGGAATTCAAGAA |
| | | AGAAGATCGGCAGAAGAAGCTGACCACGCCGTGGACAC |
| | | CGTGGGCAaaacggacagccgacggaagcgagttcgagtcaccaaagaagaagcg |
| | | gaaagtctaa |
| 198 | Cas711_D1580R_ | ATGaaacggacagccgacggaagcgagttcgagtcaccaaagaagaagcggaaagtc |
| | D988K | ACGACTACTATGAAGATTTCAATTGAATTCCTCGAGCCG |
| | (pDF0506 based) | TTTCGGATGACCAAATGGCAGGAAAGCACTAGGCGAAA |
| | Doublemutant | CAAGAACAACAAGGAATTTGTTCGCGGCCAAGCTTTTGC |
| | | AAGATGGCATAGAAATAAGAAGGATAACACAAAAGGGC |
| | | GGCCTTACATAACTGGGACATTGCTGCGGTCCGCAGTAA |
| | | TTAGAAGCGCGGAAAACCTGCTGACATTGAGTGATGGG |
| | | AAAATTAGCGAAAAGACATGTTGTCCTGGGAAATTTGAT |
| | | ACGGAAGATAAAGACAGGTTGCTGCAATTGAGGCAGCG |
| | | GTCCACCCTTCGTTGGACCGATAAGAACCCCTGTCCAGA |
| | | TAACGCTGAAACTTACTGCCCGTTTTGCGAACTTCTCGG |
| | | GAGATCCGGTAACGATGGAAAGAAGGCTGAGAAGAAGG |
| | | ATTGGCGCTTTCGTATTCATTTTGGCAATCTTTCCCTTCC |
| | | AGGGAAGCCCGATTTCGACGGGCCAAAAGCTATAGGCA |
| | | GCCAACGGGTACTTAACAGGGTCGATTTCAAATCCGGTA |
| | | AGGCCCATGACTTCTTTAAGGCTTACGAAGTCGACCATA |
| | | CTAGGTTTCCCCGCTTCGAAGGGGAGATTACCATAGATA |
| | | ATAAAGTCAGCGCTGAAGCCAGGAAACTGCTCTGTGATT |
| | | CTCTCAAGTTTACGGATCGGCTGTGTGGAGCTCTGTGCG |
| | | TAATCAGGTTCGATGAATATACACCAGCAGCCGATAGTG |
| | | GGAAACAAACCGAAAATGTCCAAGCAGAACCGAATGCT |
| | | AATCTCGCTGAAAAGACCGCAGAGCAAATTATTAGCATT |
| | | CTGGACGATAATAAGAAAACCGAATATACCCGCCTGCTT |
| | | GCTGATGCTATTCGTTCACTCCGCCGCTCTAGTAAACTTG |
| | | TCGCTGGCTTGCCAAAGGATCATGACGGGAAGGATGAC |
| | | CATTACCTCTGGGATATCGGCAAGAAGAAGAAAGACGA |
| | | AAACTCTGTCACTATTAGGCAAATCCTTACGACCTCAGC |
| | | AGACACCAAGGAACTCAAGAATGCCGGAAAATGGAGAG |
| | | AATTCTGCGAGAAGCTGGGTGAAGCGCTGTACCTCAAG |
| | | AGTAAAGACATGAGTGGCGGCCTGAAAATTACTCGGAG |
| | | AATACTGGGCGATGCTGAATTCCATGGAAAGCCCGATCG |
| | | GCTTGAAAAGAGCCGGTCTGTGTCAATCGGATCTGTGTT |
| | | GAAAGAAACTGTGGTATGCGGCGAACTGGTCGCTAAAA |
| | | CGCCCTTCTTCTTCGGAGCGATAGACGAAGATGCAAAAC |
| | | AAACCgacCTGCAAGTACTCCTCACTCCCGATAACAAGTA |
| | | TAGACTGCCAAGAAGCGCCGTGCGAGGTATACTCCGTCG |
| | | AGATCTTCAAACCTATTTTGATAGCCCATGCAATGCTGA |
| | | GTTGGGTGGACGGCCATGCATGTGTAAGACGTGTAGGAT |
| | | TATGAGAGGGATCACGGTGATGGATGCGCGCAGTGAGT |
| | | ACAATGCCCCGCCAGAAATAAGGCATCGTACCCGCATTA |
| | | ATCCCTTCACAGGCACGGTTGCGGAAGGTGCCCTGTTTA |
| | | ATATGGAAGTAGCCCCCGAGGGGATTGTCTTTCCATTTC |
| | | AACTCCGGTACCGGGGCTCTGAAGATGGGCTGCCCGATG |
| | | CACTGAAAACGGTGTTGAAATGGTGGGCTGAGGGGCAG |
| | | GCATTCATGAGTGGCGCTGCCTCAACCGGGAAGGGCCG |
| | | ATTCCGGATGGAAAATGCTAAATATGAAACGCTGGATCT |
| | | GAGCGACGAGAATCAAAGGAATGACTATCTTAAGAATT |
| | | GGGGATGGCGTGACGAGAAGGGGCTCGAGGAACTGAAG |
| | | AAACGACTGAACTCAGGTCTGCCAGAGCCCGGTAATTAT |
| | | AGGGATCCAAAATGGCACGAGATTAACGTTTCCATTGAG |
| | | ATGGCAAGCCCTTTTATTAATGGCGACCCAATCCGCGCA |
| | | GCCGTGGACAAACGTGGTACAgatGTGGTTACCTTCGTTA |
| | | AGTATAAAGCTGAAGGGGAAGAGGCGAAACCCGTATGT |
| | | GCATACAAGGCCGAATCTTTTAGAGGGGTGATCAGAAG |
| | | TGCCGTGGCACGCATTCATATGGAAGATGGCGTCCCTTT |
| | | GACTGAGTTGACTCACAGTGACTGTGAATGTCTCCTGTG |
| | | CCAAATCTTTGGAAGTGAGTATGAAGCCGGCAAAATAA |
| | | GGTTTGAAGATCTCGTATTCGAAAGTGACCCGGAACCTG |
| | | TGACCTTCGATCATGTGGCCATCGATAGATTCACTGGCG |
| | | GTGCAGCTGATAAGAAGAAATTCGATGATTCCCCTCTGC |
| | | CCGGTAGCCCTGCAAGACCGCTCATGTTGAAAGGCTCCT |
| | | TCTGGATCCGCAGGGACGTTCTCGAGGACGAAGAGTACT |
| | | GTAAGGCACTCGGTAAGGCTCTTGCAGATGTGAATAATG |
| | | GCCTTTATCCCCTCGGTGGAAAGAGCGCCATCGGCTACG |
| | | GACAGGTCAAGAGTCTGGGTATAAAGGGAGATGATAAG |
| | | AGGATTTCTCGCCTCATGAATCCTGCCTTTGATGAGACA |
| | | GATGTAGCCGTTCCAGAAAAGCCCAAAACTGATGCCGA |
| | | GGTTCGCATCGAGGCAGAGAAAGTATATTACCCACACTA |
| | | TTTCGTCGAACCCCATAAGAAGGTGGAACGCGAGGAGA |
| | | AACCCTGTGGTCATCAAAAGTTCCACGAGGGGCGACTG |
| | | ACAGGTAAAATTCGGTGTAAGCTCATTACCAAGACACCC |
| | | CTCATCGTCCCAGATACTAGTAATGACGATTTCTTCAGA |
| | | CCTGCGGATAAAGAAGCTCGGAAGGAAAAGGACGAATA |
| | | TCATAAATCATATGCTTTCTTCAGACTTCATAAACAAAT |
| | | CATGATTCCCGGGAGCGAATTGAGAGGAATGGTGAGTA |
| | | GTGTCTACGAAACTGTGACAAATTCTTGCTTCAGGATAT |
| | | TTGATGAGACTAAACGGTTGTCATGGCGGATGGATGCTG |
| | | ATCACCAGAATGTGCTGCAAAAGTTTCTCCCAGGTCGAG |
| | | TGACCGCCGATGGGAAACATATACAAAAGTTTTCCGAA |
| | | ACTGCAAGGGTGCCTTTCTATGACAAAACGCAGAAACAT |
| | | TTTGACATTCTTGATGAGCAAGAAATTGCTGGTGAGAAA |
| | | CCTGTTCGGATGTGGGTCAAGCGTTTTATTAAACGACTG |
| | | AGCCTCGTTGATCCTGCTAAACACCCCCAGAAGAAACAA |
| | | GACAATAAATGGAAAAGACGCAAAGAAGGCATCGCCAC |
| | | ATTTATAGAGCAAAAGAATGGCTCTTATTATTTTAACGT |
| | | GGTCACCAATAATGGCTGCACTTCTTTCCACTTGTGGCA |
| | | TAAACCTGACAATTTTGACCAGGAGAAACTCGAAGGCA |
| | | TACAGAATGGTGAGAAACTGGATTGCTGGGTAAGAGAT |
| | | AGTAGATACCAAAAGGCCTTTCAAGAGATACCCGAGAA |
| | | CGACCCAGACGGATGGGAGTGTAAAGAGGGCTACCTTC |
| | | ATGTCGTCGGCCCCAGCAAAGTAGAGTTTAGTGACAAG |
| | | AAAGGGGATGTGATCAATAACTTTCAAGGAACACTCCC |
| | | ATCAGTTCCCAACGACTGGAAAACAATTAGGACGAACG |
| | | ATTTTAAGAATAGGAAAAGGAAGAATGAACCTGTGTTTT |
| | | GTTGTGAGGATGATAAGGGCAATTACTATACCATGGCTA |
| | | AATATTGCGAAACCTTCTTCTTCGATCTGAAGGAGAACG |
| | | AGGAATACGAGATCCCCGAGAAAGCAAGAATCAAATAC |
| | | AAAGAACTGCTCAGGGTCTATAACAACAATCCTCAAGC |
| | | AGTGCCGGAGAGCGTATTTCAGTCTAGAGTTGCCCGGGA |
| | | AAACGTGGAAAAGCTGAAGTCCGGAGATCTTGTGTATTT |
| | | CAAACATAATGAAAAGTACGTAGAGGACATCGTCCCAG |
| | | TGCGGATTTCCCGAACTGTAGACGATAGGATGATCGGCA |
| | | AACGTATGAGCGCCGATCTGCGGCCGTGCCATGGAGATT |
| | | GGGTGGAAGATGGTGATCTCAGTGCCTTGAATGCATATC |
| | | CCGAGAAAAGACTCCTCTTGCGCCACCCCAAAGGACTCT |
| | | GCCCTGCTTGCCGGCTCTTTGGAACCGGATCTTACAAGG |
| | | GCAGAGTCAGGTTTGGATTCGCGTCACTCGAAAACGATC |
| | | CGGAGTGGCTGATCCCAGGCAAGAATCCCGGCGATCCG |
| | | TTTCACGGCGGGCCGGTGATGCTCTCATTGTTGGAACGG |
| | | CCTCGCCCGACTTGGAGTATACCGGGATCCGACAATAAG |
| | | TTTAAAGTGCCTGGCAGAAAGTTTTACGTCCACCACCAC |
| | | GCCTGGAAAACCATTAAGGACGGGAACCATCCCACAAC |
| | | AGGCAAAGCTATTGAACAAAGCCCTAATAACCGCACTG |
| | | TAGAAGCTCTCGCCGGCGGGAATTCCTTTAGCTTCGAAA |
| | | TTGCCTTTGAGAACCTGAAAGAATGGGAGCTGGGTTTGC |
| | | TCATCCACAGCCTGCAACTCGAAAAGGGTCTGGCGCATA |
| | | AACTTGGAATGGCAAAGTCTATGGGATTTGGTTCAGTTG |
| | | AAATTGACGTCGAATCAGTGCGCCTGAGAAAAGATTGG |
| | | AAGCAATGGCGGAATGGCAATTCCGAAATTCCCAACTG |
| | | GTTGGGAAAAGGATTTGCTAAACTGAAGGAATGGTTCC |
| | | GGGACGAGCTCGATTTTATAGAAAATCTTAAGAAACTTC |
| | | TTTGGTTTCCTGAGGGCGACCAAGCACCCCGGGTTTGCT |
| | | ACCCCATGCTGCGAAAGAAGGACGATCCTAATGGGAAT |
| | | AGCGGTTACGAAGAACTCAAAAGAGGGGAATTCAAGAA |
| | | AGAAGATCGGCAGAAGAAGCTGACCACGCCGTGGACAC |
| | | CGTGGGCAaaacggacagccgacggaagcgagttcgagtcaccaaagaagaagcg |
| | | gaaagtctaa |
| 199 | Cas711_D1580R_ | ATGaaacggacagccgacggaagcgagttcgagtcaccaaagaagaagcggaaagtc |
| | D988K_D981K | ACGACTACTATGAAGATTTCAATTGAATTCCTCGAGCCG |
| | (pDF0506 based) | TTTCGGATGACCAAATGGCAGGAAAGCACTAGGCGAAA |
| | Triplemutant | CAAGAACAACAAGGAATTTGTTCGCGGCCAAGCTTTTGC |
| | | AAGATGGCATAGAAATAAGAAGGATAACACAAAAGGGC |
| | | GGCCTTACATAACTGGGACATTGCTGCGGTCCGCAGTAA |
| | | TTAGAAGCGCGGAAAACCTGCTGACATTGAGTGATGGG |
| | | AAAATTAGCGAAAAGACATGTTGTCCTGGGAAATTTGAT |
| | | ACGGAAGATAAAGACAGGTTGCTGCAATTGAGGCAGCG |
| | | GTCCACCCTTCGTTGGACCGATAAGAACCCCTGTCCAGA |
| | | TAACGCTGAAACTTACTGCCCGTTTTGCGAACTTCTCGG |
| | | GAGATCCGGTAACGATGGAAAGAAGGCTGAGAAGAAGG |
| | | ATTGGCGCTTTCGTATTCATTTTGGCAATCTTTCCCTTCC |
| | | AGGGAAGCCCGATTTCGACGGGCCAAAAGCTATAGGCA |
| | | GCCAACGGGTACTTAACAGGGTCGATTTCAAATCCGGTA |
| | | AGGCCCATGACTTCTTTAAGGCTTACGAAGTCGACCATA |
| | | CTAGGTTTCCCCGCTTCGAAGGGGAGATTACCATAGATA |
| | | ATAAAGTCAGCGCTGAAGCCAGGAAACTGCTCTGTGATT |
| | | CTCTCAAGTTTACGGATCGGCTGTGTGGAGCTCTGTGCG |
| | | TAATCAGGTTCGATGAATATACACCAGCAGCCGATAGTG |
| | | GGAAACAAACCGAAAATGTCCAAGCAGAACCGAATGCT |
| | | AATCTCGCTGAAAAGACCGCAGAGCAAATTATTAGCATT |
| | | CTGGACGATAATAAGAAAACCGAATATACCCGCCTGCTT |
| | | GCTGATGCTATTCGTTCACTCCGCCGCTCTAGTAAACTTG |
| | | TCGCTGGCTTGCCAAAGGATCATGACGGGAAGGATGAC |
| | | CATTACCTCTGGGATATCGGCAAGAAGAAGAAAGACGA |
| | | AAACTCTGTCACTATTAGGCAAATCCTTACGACCTCAGC |
| | | AGACACCAAGGAACTCAAGAATGCCGGAAAATGGAGAG |
| | | AATTCTGCGAGAAGCTGGGTGAAGCGCTGTACCTCAAG |
| | | AGTAAAGACATGAGTGGCGGCCTGAAAATTACTCGGAG |
| | | AATACTGGGCGATGCTGAATTCCATGGAAAGCCCGATCG |
| | | GCTTGAAAAGAGCCGGTCTGTGTCAATCGGATCTGTGTT |
| | | GAAAGAAACTGTGGTATGCGGCGAACTGGTCGCTAAAA |
| | | CGCCCTTCTTCTTCGGAGCGATAGACGAAGATGCAAAAC |
| | | AAACCgacCTGCAAGTACTCCTCACTCCCGATAACAAGTA |
| | | TAGACTGCCAAGAAGCGCCGTGCGAGGTATACTCCGTCG |
| | | AGATCTTCAAACCTATTTTGATAGCCCATGCAATGCTGA |
| | | GTTGGGTGGACGGCCATGCATGTGTAAGACGTGTAGGAT |
| | | TATGAGAGGGATCACGGTGATGGATGCGCGCAGTGAGT |
| | | ACAATGCCCCGCCAGAAATAAGGCATCGTACCCGCATTA |
| | | ATCCCTTCACAGGCACGGTTGCGGAAGGTGCCCTGTTTA |
| | | ATATGGAAGTAGCCCCCGAGGGGATTGTCTTTCCATTTC |
| | | AACTCCGGTACCGGGGCTCTGAAGATGGGCTGCCCGATG |
| | | CACTGAAAACGGTGTTGAAATGGTGGGCTGAGGGGCAG |
| | | GCATTCATGAGTGGCGCTGCCTCAACCGGGAAGGGCCG |
| | | ATTCCGGATGGAAAATGCTAAATATGAAACGCTGGATCT |
| | | GAGCGACGAGAATCAAAGGAATGACTATCTTAAGAATT |
| | | GGGGATGGCGTGACGAGAAGGGGCTCGAGGAACTGAAG |
| | | AAACGACTGAACTCAGGTCTGCCAGAGCCCGGTAATTAT |
| | | AGGGATCCAAAATGGCACGAGATTAACGTTTCCATTGAG |
| | | ATGGCAAGCCCTTTTATTAATGGCGACCCAATCCGCGCA |
| | | GCCGTGGACAAACGTGGTACAgatGTGGTTACCTTCGTTA |
| | | AGTATAAAGCTGAAGGGGAAGAGGCGAAACCCGTATGT |
| | | GCATACAAGGCCGAATCTTTTAGAGGGGTGATCAGAAG |
| | | TGCCGTGGCACGCATTCATATGGAAGATGGCGTCCCTTT |
| | | GACTGAGTTGACTCACAGTGACTGTGAATGTCTCCTGTG |
| | | CCAAATCTTTGGAAGTGAGTATGAAGCCGGCAAAATAA |
| | | GGTTTGAAGATCTCGTATTCGAAAGTGACCCGGAACCTG |
| | | TGACCTTCGATCATGTGGCCATCGATAGATTCACTGGCG |
| | | GTGCAGCTGATAAGAAGAAATTCGATGATTCCCCTCTGC |
| | | CCGGTAGCCCTGCAAGACCGCTCATGTTGAAAGGCTCCT |
| | | TCTGGATCCGCAGGGACGTTCTCGAGGACGAAGAGTACT |
| | | GTAAGGCACTCGGTAAGGCTCTTGCAGATGTGAATAATG |
| | | GCCTTTATCCCCTCGGTGGAAAGAGCGCCATCGGCTACG |
| | | GACAGGTCAAGAGTCTGGGTATAAAGGGAGATGATAAG |
| | | AGGATTTCTCGCCTCATGAATCCTGCCTTTGATGAGACA |
| | | GATGTAGCCGTTCCAGAAAAGCCCAAAACTGATGCCGA |
| | | GGTTCGCATCGAGGCAGAGAAAGTATATTACCCACACTA |
| | | TTTCGTCGAACCCCATAAGAAGGTGGAACGCGAGGAGA |
| | | AACCCTGTGGTCATCAAAAGTTCCACGAGGGGCGACTG |
| | | ACAGGTAAAATTCGGTGTAAGCTCATTACCAAGACACCC |
| | | CTCATCGTCCCAGATACTAGTAATGACGATTTCTTCAGA |
| | | CCTGCGGATAAAGAAGCTCGGAAGGAAAAGGACGAATA |
| | | TCATAAATCATATGCTTTCTTCAGACTTCATAAACAAAT |
| | | CATGATTCCCGGGAGCGAATTGAGAGGAATGGTGAGTA |
| | | GTGTCTACGAAACTGTGACAAATTCTTGCTTCAGGATAT |
| | | TTGATGAGACTAAACGGTTGTCATGGCGGATGGATGCTA |
| | | AGCACCAGAATGTGCTGCAAAAGTTTCTCCCAGGTCGAG |
| | | TGACCGCCGATGGGAAACATATACAAAAGTTTTCCGAA |
| | | ACTGCAAGGGTGCCTTTCTATGACAAAACGCAGAAACAT |
| | | TTTGACATTCTTGATGAGCAAGAAATTGCTGGTGAGAAA |
| | | CCTGTTCGGATGTGGGTCAAGCGTTTTATTAAACGACTG |
| | | AGCCTCGTTGATCCTGCTAAACACCCCCAGAAGAAACAA |
| | | GACAATAAATGGAAAAGACGCAAAGAAGGCATCGCCAC |
| | | ATTTATAGAGCAAAAGAATGGCTCTTATTATTTTAACGT |
| | | GGTCACCAATAATGGCTGCACTTCTTTCCACTTGTGGCA |
| | | TAAACCTGACAATTTTGACCAGGAGAAACTCGAAGGCA |
| | | TACAGAATGGTGAGAAACTGGATTGCTGGGTAAGAGAT |
| | | AGTAGATACCAAAAGGCCTTTCAAGAGATACCCGAGAA |
| | | CGACCCAGACGGATGGGAGTGTAAAGAGGGCTACCTTC |
| | | ATGTCGTCGGCCCCAGCAAAGTAGAGTTTAGTGACAAG |
| | | AAAGGGGATGTGATCAATAACTTTCAAGGAACACTCCC |
| | | ATCAGTTCCCAACGACTGGAAAACAATTAGGACGAACG |
| | | ATTTTAAGAATAGGAAAAGGAAGAATGAACCTGTGTTTT |
| | | GTTGTGAGGATGATAAGGGCAATTACTATACCATGGCTA |
| | | AATATTGCGAAACCTTCTTCTTCGATCTGAAGGAGAACG |
| | | AGGAATACGAGATCCCCGAGAAAGCAAGAATCAAATAC |
| | | AAAGAACTGCTCAGGGTCTATAACAACAATCCTCAAGC |
| | | AGTGCCGGAGAGCGTATTTCAGTCTAGAGTTGCCCGGGA |
| | | AAACGTGGAAAAGCTGAAGTCCGGAGATCTTGTGTATTT |
| | | CAAACATAATGAAAAGTACGTAGAGGACATCGTCCCAG |
| | | TGCGGATTTCCCGAACTGTAGACGATAGGATGATCGGCA |
| | | AACGTATGAGCGCCGATCTGCGGCCGTGCCATGGAGATT |
| | | GGGTGGAAGATGGTGATCTCAGTGCCTTGAATGCATATC |
| | | CCGAGAAAAGACTCCTCTTGCGCCACCCCAAAGGACTCT |
| | | GCCCTGCTTGCCGGCTCTTTGGAACCGGATCTTACAAGG |
| | | GCAGAGTCAGGTTTGGATTCGCGTCACTCGAAAACGATC |
| | | CGGAGTGGCTGATCCCAGGCAAGAATCCCGGCGATCCG |
| | | TTTCACGGCGGGCCGGTGATGCTCTCATTGTTGGAACGG |
| | | CCTCGCCCGACTTGGAGTATACCGGGATCCGACAATAAG |
| | | TTTAAAGTGCCTGGCAGAAAGTTTTACGTCCACCACCAC |
| | | GCCTGGAAAACCATTAAGGACGGGAACCATCCCACAAC |
| | | AGGCAAAGCTATTGAACAAAGCCCTAATAACCGCACTG |
| | | TAGAAGCTCTCGCCGGCGGGAATTCCTTTAGCTTCGAAA |
| | | TTGCCTTTGAGAACCTGAAAGAATGGGAGCTGGGTTTGC |
| | | TCATCCACAGCCTGCAACTCGAAAAGGGTCTGGCGCATA |
| | | AACTTGGAATGGCAAAGTCTATGGGATTTGGTTCAGTTG |
| | | AAATTGACGTCGAATCAGTGCGCCTGAGAAAAGATTGG |
| | | AAGCAATGGCGGAATGGCAATTCCGAAATTCCCAACTG |
| | | GTTGGGAAAAGGATTTGCTAAACTGAAGGAATGGTTCC |
| | | GGGACGAGCTCGATTTTATAGAAAATCTTAAGAAACTTC |
| | | TTTGGTTTCCTGAGGGCGACCAAGCACCCCGGGTTTGCT |
| | | ACCCCATGCTGCGAAAGAAGGACGATCCTAATGGGAAT |
| | | AGCGGTTACGAAGAACTCAAAAGAGGGGAATTCAAGAA |
| | | AGAAGATCGGCAGAAGAAGCTGACCACGCCGTGGACAC |
| | | CGTGGGCAaaacggacagccgacggaagcgagttcgagtcaccaaagaagaagcg |
| | | gaaagtctaa |
| 200 | Cas711_D1580R_ | ATGaaacggacagccgacggaagcgagttcgagtcaccaaagaagaagcggaaagtc |
| | (pDF0506 based) | ACGACTACTATGAAGATTTCAATTGAATTCCTCGAGCCG |
| | Singlemutant | TTTCGGATGACCAAATGGCAGGAAAGCACTAGGCGAAA |
| | | CAAGAACAACAAGGAATTTGTTCGCGGCCAAGCTTTTGC |
| | | AAGATGGCATAGAAATAAGAAGGATAACACAAAAGGGC |
| | | GGCCTTACATAACTGGGACATTGCTGCGGTCCGCAGTAA |
| | | TTAGAAGCGCGGAAAACCTGCTGACATTGAGTGATGGG |
| | | AAAATTAGCGAAAAGACATGTTGTCCTGGGAAATTTGAT |
| | | ACGGAAGATAAAGACAGGTTGCTGCAATTGAGGCAGCG |
| | | GTCCACCCTTCGTTGGACCGATAAGAACCCCTGTCCAGA |
| | | TAACGCTGAAACTTACTGCCCGTTTTGCGAACTTCTCGG |
| | | GAGATCCGGTAACGATGGAAAGAAGGCTGAGAAGAAGG |
| | | ATTGGCGCTTTCGTATTCATTTTGGCAATCTTTCCCTTCC |
| | | AGGGAAGCCCGATTTCGACGGGCCAAAAGCTATAGGCA |
| | | GCCAACGGGTACTTAACAGGGTCGATTTCAAATCCGGTA |
| | | AGGCCCATGACTTCTTTAAGGCTTACGAAGTCGACCATA |
| | | CTAGGTTTCCCCGCTTCGAAGGGGAGATTACCATAGATA |
| | | ATAAAGTCAGCGCTGAAGCCAGGAAACTGCTCTGTGATT |
| | | CTCTCAAGTTTACGGATCGGCTGTGTGGAGCTCTGTGCG |
| | | TAATCAGGTTCGATGAATATACACCAGCAGCCGATAGTG |
| | | GGAAACAAACCGAAAATGTCCAAGCAGAACCGAATGCT |
| | | AATCTCGCTGAAAAGACCGCAGAGCAAATTATTAGCATT |
| | | CTGGACGATAATAAGAAAACCGAATATACCCGCCTGCTT |
| | | GCTGATGCTATTCGTTCACTCCGCCGCTCTAGTAAACTTG |
| | | TCGCTGGCTTGCCAAAGGATCATGACGGGAAGGATGAC |
| | | CATAAGCTCTGGGATATCGGCAAGAAGAAGAAAGACGA |
| | | AAACTCTGTCACTATTAGGCAAATCCTTACGACCTCAGC |
| | | AGACACCAAGGAACTCAAGAATGCCGGAAAATGGAGAG |
| | | AATTCTGCGAGAAGCTGGGTGAAGCGCTGTACCTCAAG |
| | | AGTAAAGACATGAGTGGCGGCCTGAAAATTACTCGGAG |
| | | AATACTGGGCGATGCTGAATTCCATGGAAAGCCCGATCG |
| | | GCTTGAAAAGAGCCGGTCTGTGTCAATCGGATCTGTGTT |
| | | GAAAGAAACTGTGGTATGCGGCGAACTGGTCGCTAAAA |
| | | CGCCCTTCTTCTTCGGAGCGATAGACGAAGATGCAAAAC |
| | | AAACCgacCTGCAAGTACTCCTCACTCCCGATAACAAGTA |
| | | TAGACTGCCAAGAAGCGCCGTGCGAGGTATACTCCGTCG |
| | | AGATCTTCAAACCTATTTTGATAGCCCATGCAATGCTGA |
| | | GTTGGGTGGACGGCCATGCATGTGTAAGACGTGTAGGAT |
| | | TATGAGAGGGATCACGGTGATGGATGCGCGCAGTGAGT |
| | | ACAATGCCCCGCCAGAAATAAGGCATCGTACCCGCATTA |
| | | ATCCCTTCACAGGCACGGTTGCGGAAGGTGCCCTGTTTA |
| | | ATATGGAAGTAGCCCCCGAGGGGATTGTCTTTCCATTTC |
| | | AACTCCGGTACCGGGGCTCTGAAGATGGGCTGCCCGATG |
| | | CACTGAAAACGGTGTTGAAATGGTGGGCTGAGGGGCAG |
| | | GCATTCATGAGTGGCGCTGCCTCAACCGGGAAGGGCCG |
| | | ATTCCGGATGGAAAATGCTAAATATGAAACGCTGGATCT |
| | | GAGCGACGAGAATCAAAGGAATGACTATCTTAAGAATT |
| | | GGGGATGGCGTGACGAGAAGGGGCTCGAGGAACTGAAG |
| | | AAACGACTGAACTCAGGTCTGCCAGAGCCCGGTAATTAT |
| | | AGGGATCCAAAATGGCACGAGATTAACGTTTCCATTGAG |
| | | ATGGCAAGCCCTTTTATTAATGGCGACCCAATCCGCGCA |
| | | GCCGTGGACAAACGTGGTACAgatGTGGTTACCTTCGTTA |
| | | AGTATAAAGCTGAAGGGGAAGAGGCGAAACCCGTATGT |
| | | GCATACAAGGCCGAATCTTTTAGAGGGGTGATCAGAAG |
| | | TGCCGTGGCACGCATTCATATGGAAGATGGCGTCCCTTT |
| | | GACTGAGTTGACTCACAGTGACTGTGAATGTCTCCTGTG |
| | | CCAAATCTTTGGAAGTGAGTATGAAGCCGGCAAAATAA |
| | | GGTTTGAAGATCTCGTATTCGAAAGTGACCCGGAACCTG |
| | | TGACCTTCGATCATGTGGCCATCGATAGATTCACTGGCG |
| | | GTGCAGCTGATAAGAAGAAATTCGATGATTCCCCTCTGC |
| | | CCGGTAGCCCTGCAAGACCGCTCATGTTGAAAGGCTCCT |
| | | TCTGGATCCGCAGGGACGTTCTCGAGGACGAAGAGTACT |
| | | GTAAGGCACTCGGTAAGGCTCTTGCAGATGTGAATAATG |
| | | GCCTTTATCCCCTCGGTGGAAAGAGCGCCATCGGCTACG |
| | | GACAGGTCAAGAGTCTGGGTATAAAGGGAGATGATAAG |
| | | AGGATTTCTCGCCTCATGAATCCTGCCTTTGATGAGACA |
| | | GATGTAGCCGTTCCAGAAAAGCCCAAAACTGATGCCGA |
| | | GGTTCGCATCGAGGCAGAGAAAGTATATTACCCACACTA |
| | | TTTCGTCGAACCCCATAAGAAGGTGGAACGCGAGGAGA |
| | | AACCCTGTGGTCATCAAAAGTTCCACGAGGGGCGACTG |
| | | ACAGGTAAAATTCGGTGTAAGCTCATTACCAAGACACCC |
| | | CTCATCGTCCCAGATACTAGTAATGACGATTTCTTCAGA |
| | | CCTGCGGATAAAGAAGCTCGGAAGGAAAAGGACGAATA |
| | | TCATAAATCATATGCTTTCTTCAGACTTCATAAACAAAT |
| | | CATGATTCCCGGGAGCGAATTGAGAGGAATGGTGAGTA |
| | | GTGTCTACGAAACTGTGACAAATTCTTGCTTCAGGATAT |
| | | TTGATGAGACTAAACGGTTGTCATGGCGGATGGATGCTA |
| | | AGCACCAGAATGTGCTGCAAAAGTTTCTCCCAGGTCGAG |
| | | TGACCGCCGATGGGAAACATATACAAAAGTTTTCCGAA |
| | | ACTGCAAGGGTGCCTTTCTATGACAAAACGCAGAAACAT |
| | | TTTGACATTCTTGATGAGCAAGAAATTGCTGGTGAGAAA |
| | | CCTGTTCGGATGTGGGTCAAGCGTTTTATTAAACGACTG |
| | | AGCCTCGTTGATCCTGCTAAACACCCCCAGAAGAAACAA |
| | | GACAATAAATGGAAAAGACGCAAAGAAGGCATCGCCAC |
| | | ATTTATAGAGCAAAAGAATGGCTCTTATTATTTTAACGT |
| | | GGTCACCAATAATGGCTGCACTTCTTTCCACTTGTGGCA |
| | | TAAACCTGACAATTTTGACCAGGAGAAACTCGAAGGCA |
| | | TACAGAATGGTGAGAAACTGGATTGCTGGGTAAGAGAT |
| | | AGTAGATACCAAAAGGCCTTTCAAGAGATACCCGAGAA |
| | | CGACCCAGACGGATGGGAGTGTAAAGAGGGCTACCTTC |
| | | ATGTCGTCGGCCCCAGCAAAGTAGAGTTTAGTGACAAG |
| | | AAAGGGGATGTGATCAATAACTTTCAAGGAACACTCCC |
| | | ATCAGTTCCCAACGACTGGAAAACAATTAGGACGAACG |
| | | ATTTTAAGAATAGGAAAAGGAAGAATGAACCTGTGTTTT |
| | | GTTGTGAGGATGATAAGGGCAATTACTATACCATGGCTA |
| | | AATATTGCGAAACCTTCTTCTTCGATCTGAAGGAGAACG |
| | | AGGAATACGAGATCCCCGAGAAAGCAAGAATCAAATAC |
| | | AAAGAACTGCTCAGGGTCTATAACAACAATCCTCAAGC |
| | | AGTGCCGGAGAGCGTATTTCAGTCTAGAGTTGCCCGGGA |
| | | AAACGTGGAAAAGCTGAAGTCCGGAGATCTTGTGTATTT |
| | | CAAACATAATGAAAAGTACGTAGAGGACATCGTCCCAG |
| | | TGCGGATTTCCCGAACTGTAGACGATAGGATGATCGGCA |
| | | AACGTATGAGCGCCGATCTGCGGCCGTGCCATGGAGATT |
| | | GGGTGGAAGATGGTGATCTCAGTGCCTTGAATGCATATC |
| | | CCGAGAAAAGACTCCTCTTGCGCCACCCCAAAGGACTCT |
| | | GCCCTGCTTGCCGGCTCTTTGGAACCGGATCTTACAAGG |
| | | GCAGAGTCAGGTTTGGATTCGCGTCACTCGAAAACGATC |
| | | CGGAGTGGCTGATCCCAGGCAAGAATCCCGGCGATCCG |
| | | TTTCACGGCGGGCCGGTGATGCTCTCATTGTTGGAACGG |
| | | CCTCGCCCGACTTGGAGTATACCGGGATCCGACAATAAG |
| | | TTTAAAGTGCCTGGCAGAAAGTTTTACGTCCACCACCAC |
| | | GCCTGGAAAACCATTAAGGACGGGAACCATCCCACAAC |
| | | AGGCAAAGCTATTGAACAAAGCCCTAATAACCGCACTG |
| | | TAGAAGCTCTCGCCGGCGGGAATTCCTTTAGCTTCGAAA |
| | | TTGCCTTTGAGAACCTGAAAGAATGGGAGCTGGGTTTGC |
| | | TCATCCACAGCCTGCAACTCGAAAAGGGTCTGGCGCATA |
| | | AACTTGGAATGGCAAAGTCTATGGGATTTGGTTCAGTTG |
| | | AAATTGACGTCGAATCAGTGCGCCTGAGAAAAGATTGG |
| | | AAGCAATGGCGGAATGGCAATTCCGAAATTCCCAACTG |
| | | GTTGGGAAAAGGATTTGCTAAACTGAAGGAATGGTTCC |
| | | GGGACGAGCTCGATTTTATAGAAAATCTTAAGAAACTTC |
| | | TTTGGTTTCCTGAGGGCGACCAAGCACCCCGGGTTTGCT |
| | | ACCCCATGCTGCGAAAGAAGGACGATCCTAATGGGAAT |
| | | AGCGGTTACGAAGAACTCAAAAGAGGGGAATTCAAGAA |
| | | AGAAGATCGGCAGAAGAAGCTGACCACGCCGTGGACAC |
| | | CGTGGGCAaaacggacagccgacggaagcgagttcgagtcaccaaagaagaagcg |
| | | gaaagtctaa |
| 201 | Cas711_D1580R_ | ATGaaacggacagccgacggaagcgagttcgagtcaccaaagaagaagcggaaagtc |
| | D988K | ACGACTACTATGAAGATTTCAATTGAATTCCTCGAGCCG |
| | (pDF0506 based) | TTTCGGATGACCAAATGGCAGGAAAGCACTAGGCGAAA |
| | Doublemutant | CAAGAACAACAAGGAATTTGTTCGCGGCCAAGCTTTTGC |
| | | AAGATGGCATAGAAATAAGAAGGATAACACAAAAGGGC |
| | | GGCCTTACATAACTGGGACATTGCTGCGGTCCGCAGTAA |
| | | TTAGAAGCGCGGAAAACCTGCTGACATTGAGTGATGGG |
| | | AAAATTAGCGAAAAGACATGTTGTCCTGGGAAATTTGAT |
| | | ACGGAAGATAAAGACAGGTTGCTGCAATTGAGGCAGCG |
| | | GTCCACCCTTCGTTGGACCGATAAGAACCCCTGTCCAGA |
| | | TAACGCTGAAACTTACTGCCCGTTTTGCGAACTTCTCGG |
| | | GAGATCCGGTAACGATGGAAAGAAGGCTGAGAAGAAGG |
| | | ATTGGCGCTTTCGTATTCATTTTGGCAATCTTTCCCTTCC |
| | | AGGGAAGCCCGATTTCGACGGGCCAAAAGCTATAGGCA |
| | | GCCAACGGGTACTTAACAGGGTCGATTTCAAATCCGGTA |
| | | AGGCCCATGACTTCTTTAAGGCTTACGAAGTCGACCATA |
| | | CTAGGTTTCCCCGCTTCGAAGGGGAGATTACCATAGATA |
| | | ATAAAGTCAGCGCTGAAGCCAGGAAACTGCTCTGTGATT |
| | | CTCTCAAGTTTACGGATCGGCTGTGTGGAGCTCTGTGCG |
| | | TAATCAGGTTCGATGAATATACACCAGCAGCCGATAGTG |
| | | GGAAACAAACCGAAAATGTCCAAGCAGAACCGAATGCT |
| | | AATCTCGCTGAAAAGACCGCAGAGCAAATTATTAGCATT |
| | | CTGGACGATAATAAGAAAACCGAATATACCCGCCTGCTT |
| | | GCTGATGCTATTCGTTCACTCCGCCGCTCTAGTAAACTTG |
| | | TCGCTGGCTTGCCAAAGGATCATGACGGGAAGGATGAC |
| | | CATAAGCTCTGGGATATCGGCAAGAAGAAGAAAGACGA |
| | | AAACTCTGTCACTATTAGGCAAATCCTTACGACCTCAGC |
| | | AGACACCAAGGAACTCAAGAATGCCGGAAAATGGAGAG |
| | | AATTCTGCGAGAAGCTGGGTGAAGCGCTGTACCTCAAG |
| | | AGTAAAGACATGAGTGGCGGCCTGAAAATTACTCGGAG |
| | | AATACTGGGCGATGCTGAATTCCATGGAAAGCCCGATCG |
| | | GCTTGAAAAGAGCCGGTCTGTGTCAATCGGATCTGTGTT |
| | | GAAAGAAACTGTGGTATGCGGCGAACTGGTCGCTAAAA |
| | | CGCCCTTCTTCTTCGGAGCGATAGACGAAGATGCAAAAC |
| | | AAACCgacCTGCAAGTACTCCTCACTCCCGATAACAAGTA |
| | | TAGACTGCCAAGAAGCGCCGTGCGAGGTATACTCCGTCG |
| | | AGATCTTCAAACCTATTTTGATAGCCCATGCAATGCTGA |
| | | GTTGGGTGGACGGCCATGCATGTGTAAGACGTGTAGGAT |
| | | TATGAGAGGGATCACGGTGATGGATGCGCGCAGTGAGT |
| | | ACAATGCCCCGCCAGAAATAAGGCATCGTACCCGCATTA |
| | | ATCCCTTCACAGGCACGGTTGCGGAAGGTGCCCTGTTTA |
| | | ATATGGAAGTAGCCCCCGAGGGGATTGTCTTTCCATTTC |
| | | AACTCCGGTACCGGGGCTCTGAAGATGGGCTGCCCGATG |
| | | CACTGAAAACGGTGTTGAAATGGTGGGCTGAGGGGCAG |
| | | GCATTCATGAGTGGCGCTGCCTCAACCGGGAAGGGCCG |
| | | ATTCCGGATGGAAAATGCTAAATATGAAACGCTGGATCT |
| | | GAGCGACGAGAATCAAAGGAATGACTATCTTAAGAATT |
| | | GGGGATGGCGTGACGAGAAGGGGCTCGAGGAACTGAAG |
| | | AAACGACTGAACTCAGGTCTGCCAGAGCCCGGTAATTAT |
| | | AGGGATCCAAAATGGCACGAGATTAACGTTTCCATTGAG |
| | | ATGGCAAGCCCTTTTATTAATGGCGACCCAATCCGCGCA |
| | | GCCGTGGACAAACGTGGTACAgatGTGGTTACCTTCGTTA |
| | | AGTATAAAGCTGAAGGGGAAGAGGCGAAACCCGTATGT |
| | | GCATACAAGGCCGAATCTTTTAGAGGGGTGATCAGAAG |
| | | TGCCGTGGCACGCATTCATATGGAAGATGGCGTCCCTTT |
| | | GACTGAGTTGACTCACAGTGACTGTGAATGTCTCCTGTG |
| | | CCAAATCTTTGGAAGTGAGTATGAAGCCGGCAAAATAA |
| | | GGTTTGAAGATCTCGTATTCGAAAGTGACCCGGAACCTG |
| | | TGACCTTCGATCATGTGGCCATCGATAGATTCACTGGCG |
| | | GTGCAGCTGATAAGAAGAAATTCGATGATTCCCCTCTGC |
| | | CCGGTAGCCCTGCAAGACCGCTCATGTTGAAAGGCTCCT |
| | | TCTGGATCCGCAGGGACGTTCTCGAGGACGAAGAGTACT |
| | | GTAAGGCACTCGGTAAGGCTCTTGCAGATGTGAATAATG |
| | | GCCTTTATCCCCTCGGTGGAAAGAGCGCCATCGGCTACG |
| | | GACAGGTCAAGAGTCTGGGTATAAAGGGAGATGATAAG |
| | | AGGATTTCTCGCCTCATGAATCCTGCCTTTGATGAGACA |
| | | GATGTAGCCGTTCCAGAAAAGCCCAAAACTGATGCCGA |
| | | GGTTCGCATCGAGGCAGAGAAAGTATATTACCCACACTA |
| | | TTTCGTCGAACCCCATAAGAAGGTGGAACGCGAGGAGA |
| | | AACCCTGTGGTCATCAAAAGTTCCACGAGGGGCGACTG |
| | | ACAGGTAAAATTCGGTGTAAGCTCATTACCAAGACACCC |
| | | CTCATCGTCCCAGATACTAGTAATGACGATTTCTTCAGA |
| | | CCTGCGGATAAAGAAGCTCGGAAGGAAAAGGACGAATA |
| | | TCATAAATCATATGCTTTCTTCAGACTTCATAAACAAAT |
| | | CATGATTCCCGGGAGCGAATTGAGAGGAATGGTGAGTA |
| | | GTGTCTACGAAACTGTGACAAATTCTTGCTTCAGGATAT |
| | | TTGATGAGACTAAACGGTTGTCATGGCGGATGGATGCTG |
| | | ATCACCAGAATGTGCTGCAAAAGTTTCTCCCAGGTCGAG |
| | | TGACCGCCGATGGGAAACATATACAAAAGTTTTCCGAA |
| | | ACTGCAAGGGTGCCTTTCTATGACAAAACGCAGAAACAT |
| | | TTTGACATTCTTGATGAGCAAGAAATTGCTGGTGAGAAA |
| | | CCTGTTCGGATGTGGGTCAAGCGTTTTATTAAACGACTG |
| | | AGCCTCGTTGATCCTGCTAAACACCCCCAGAAGAAACAA |
| | | GACAATAAATGGAAAAGACGCAAAGAAGGCATCGCCAC |
| | | ATTTATAGAGCAAAAGAATGGCTCTTATTATTTTAACGT |
| | | GGTCACCAATAATGGCTGCACTTCTTTCCACTTGTGGCA |
| | | TAAACCTGACAATTTTGACCAGGAGAAACTCGAAGGCA |
| | | TACAGAATGGTGAGAAACTGGATTGCTGGGTAAGAGAT |
| | | AGTAGATACCAAAAGGCCTTTCAAGAGATACCCGAGAA |
| | | CGACCCAGACGGATGGGAGTGTAAAGAGGGCTACCTTC |
| | | ATGTCGTCGGCCCCAGCAAAGTAGAGTTTAGTGACAAG |
| | | AAAGGGGATGTGATCAATAACTTTCAAGGAACACTCCC |
| | | ATCAGTTCCCAACGACTGGAAAACAATTAGGACGAACG |
| | | ATTTTAAGAATAGGAAAAGGAAGAATGAACCTGTGTTTT |
| | | GTTGTGAGGATGATAAGGGCAATTACTATACCATGGCTA |
| | | AATATTGCGAAACCTTCTTCTTCGATCTGAAGGAGAACG |
| | | AGGAATACGAGATCCCCGAGAAAGCAAGAATCAAATAC |
| | | AAAGAACTGCTCAGGGTCTATAACAACAATCCTCAAGC |
| | | AGTGCCGGAGAGCGTATTTCAGTCTAGAGTTGCCCGGGA |
| | | AAACGTGGAAAAGCTGAAGTCCGGAGATCTTGTGTATTT |
| | | CAAACATAATGAAAAGTACGTAGAGGACATCGTCCCAG |
| | | TGCGGATTTCCCGAACTGTAGACGATAGGATGATCGGCA |
| | | AACGTATGAGCGCCGATCTGCGGCCGTGCCATGGAGATT |
| | | GGGTGGAAGATGGTGATCTCAGTGCCTTGAATGCATATC |
| | | CCGAGAAAAGACTCCTCTTGCGCCACCCCAAAGGACTCT |
| | | GCCCTGCTTGCCGGCTCTTTGGAACCGGATCTTACAAGG |
| | | GCAGAGTCAGGTTTGGATTCGCGTCACTCGAAAACGATC |
| | | CGGAGTGGCTGATCCCAGGCAAGAATCCCGGCGATCCG |
| | | TTTCACGGCGGGCCGGTGATGCTCTCATTGTTGGAACGG |
| | | CCTCGCCCGACTTGGAGTATACCGGGATCCGACAATAAG |
| | | TTTAAAGTGCCTGGCAGAAAGTTTTACGTCCACCACCAC |
| | | GCCTGGAAAACCATTAAGGACGGGAACCATCCCACAAC |
| | | AGGCAAAGCTATTGAACAAAGCCCTAATAACCGCACTG |
| | | TAGAAGCTCTCGCCGGCGGGAATTCCTTTAGCTTCGAAA |
| | | TTGCCTTTGAGAACCTGAAAGAATGGGAGCTGGGTTTGC |
| | | TCATCCACAGCCTGCAACTCGAAAAGGGTCTGGCGCATA |
| | | AACTTGGAATGGCAAAGTCTATGGGATTTGGTTCAGTTG |
| | | AAATTGACGTCGAATCAGTGCGCCTGAGAAAAGATTGG |
| | | AAGCAATGGCGGAATGGCAATTCCGAAATTCCCAACTG |
| | | GTTGGGAAAAGGATTTGCTAAACTGAAGGAATGGTTCC |
| | | GGGACGAGCTCGATTTTATAGAAAATCTTAAGAAACTTC |
| | | TTTGGTTTCCTGAGGGCGACCAAGCACCCCGGGTTTGCT |
| | | ACCCCATGCTGCGAAAGAAGGACGATCCTAATGGGAAT |
| | | AGCGGTTACGAAGAACTCAAAAGAGGGGAATTCAAGAA |
| | | AGAAGATCGGCAGAAGAAGCTGACCACGCCGTGGACAC |
| | | CGTGGGCAaaacggacagccgacggaagcgagttcgagtcaccaaagaagaagcg |
| | | gaaagtctaa |
| 202 | Cas711_D1580R_ | ATGaaacggacagccgacggaagcgagttcgagtcaccaaagaagaagcggaaagtc |
| | D988K_D981K | ACGACTACTATGAAGATTTCAATTGAATTCCTCGAGCCG |
| | (pDF0506 based) | TTTCGGATGACCAAATGGCAGGAAAGCACTAGGCGAAA |
| | Triplemutant | CAAGAACAACAAGGAATTTGTTCGCGGCCAAGCTTTTGC |
| | | AAGATGGCATAGAAATAAGAAGGATAACACAAAAGGGC |
| | | GGCCTTACATAACTGGGACATTGCTGCGGTCCGCAGTAA |
| | | TTAGAAGCGCGGAAAACCTGCTGACATTGAGTGATGGG |
| | | AAAATTAGCGAAAAGACATGTTGTCCTGGGAAATTTGAT |
| | | ACGGAAGATAAAGACAGGTTGCTGCAATTGAGGCAGCG |
| | | GTCCACCCTTCGTTGGACCGATAAGAACCCCTGTCCAGA |
| | | TAACGCTGAAACTTACTGCCCGTTTTGCGAACTTCTCGG |
| | | GAGATCCGGTAACGATGGAAAGAAGGCTGAGAAGAAGG |
| | | ATTGGCGCTTTCGTATTCATTTTGGCAATCTTTCCCTTCC |
| | | AGGGAAGCCCGATTTCGACGGGCCAAAAGCTATAGGCA |
| | | GCCAACGGGTACTTAACAGGGTCGATTTCAAATCCGGTA |
| | | AGGCCCATGACTTCTTTAAGGCTTACGAAGTCGACCATA |
| | | CTAGGTTTCCCCGCTTCGAAGGGGAGATTACCATAGATA |
| | | ATAAAGTCAGCGCTGAAGCCAGGAAACTGCTCTGTGATT |
| | | CTCTCAAGTTTACGGATCGGCTGTGTGGAGCTCTGTGCG |
| | | TAATCAGGTTCGATGAATATACACCAGCAGCCGATAGTG |
| | | GGAAACAAACCGAAAATGTCCAAGCAGAACCGAATGCT |
| | | AATCTCGCTGAAAAGACCGCAGAGCAAATTATTAGCATT |
| | | CTGGACGATAATAAGAAAACCGAATATACCCGCCTGCTT |
| | | GCTGATGCTATTCGTTCACTCCGCCGCTCTAGTAAACTTG |
| | | TCGCTGGCTTGCCAAAGGATCATGACGGGAAGGATGAC |
| | | CATAAGCTCTGGGATATCGGCAAGAAGAAGAAAGACGA |
| | | AAACTCTGTCACTATTAGGCAAATCCTTACGACCTCAGC |
| | | AGACACCAAGGAACTCAAGAATGCCGGAAAATGGAGAG |
| | | AATTCTGCGAGAAGCTGGGTGAAGCGCTGTACCTCAAG |
| | | AGTAAAGACATGAGTGGCGGCCTGAAAATTACTCGGAG |
| | | AATACTGGGCGATGCTGAATTCCATGGAAAGCCCGATCG |
| | | GCTTGAAAAGAGCCGGTCTGTGTCAATCGGATCTGTGTT |
| | | GAAAGAAACTGTGGTATGCGGCGAACTGGTCGCTAAAA |
| | | CGCCCTTCTTCTTCGGAGCGATAGACGAAGATGCAAAAC |
| | | AAACCgacCTGCAAGTACTCCTCACTCCCGATAACAAGTA |
| | | TAGACTGCCAAGAAGCGCCGTGCGAGGTATACTCCGTCG |
| | | AGATCTTCAAACCTATTTTGATAGCCCATGCAATGCTGA |
| | | GTTGGGTGGACGGCCATGCATGTGTAAGACGTGTAGGAT |
| | | TATGAGAGGGATCACGGTGATGGATGCGCGCAGTGAGT |
| | | ACAATGCCCCGCCAGAAATAAGGCATCGTACCCGCATTA |
| | | ATCCCTTCACAGGCACGGTTGCGGAAGGTGCCCTGTTTA |
| | | ATATGGAAGTAGCCCCCGAGGGGATTGTCTTTCCATTTC |
| | | AACTCCGGTACCGGGGCTCTGAAGATGGGCTGCCCGATG |
| | | CACTGAAAACGGTGTTGAAATGGTGGGCTGAGGGGCAG |
| | | GCATTCATGAGTGGCGCTGCCTCAACCGGGAAGGGCCG |
| | | ATTCCGGATGGAAAATGCTAAATATGAAACGCTGGATCT |
| | | GAGCGACGAGAATCAAAGGAATGACTATCTTAAGAATT |
| | | GGGGATGGCGTGACGAGAAGGGGCTCGAGGAACTGAAG |
| | | AAACGACTGAACTCAGGTCTGCCAGAGCCCGGTAATTAT |
| | | AGGGATCCAAAATGGCACGAGATTAACGTTTCCATTGAG |
| | | ATGGCAAGCCCTTTTATTAATGGCGACCCAATCCGCGCA |
| | | GCCGTGGACAAACGTGGTACAgatGTGGTTACCTTCGTTA |
| | | AGTATAAAGCTGAAGGGGAAGAGGCGAAACCCGTATGT |
| | | GCATACAAGGCCGAATCTTTTAGAGGGGTGATCAGAAG |
| | | TGCCGTGGCACGCATTCATATGGAAGATGGCGTCCCTTT |
| | | GACTGAGTTGACTCACAGTGACTGTGAATGTCTCCTGTG |
| | | CCAAATCTTTGGAAGTGAGTATGAAGCCGGCAAAATAA |
| | | GGTTTGAAGATCTCGTATTCGAAAGTGACCCGGAACCTG |
| | | TGACCTTCGATCATGTGGCCATCGATAGATTCACTGGCG |
| | | GTGCAGCTGATAAGAAGAAATTCGATGATTCCCCTCTGC |
| | | CCGGTAGCCCTGCAAGACCGCTCATGTTGAAAGGCTCCT |
| | | TCTGGATCCGCAGGGACGTTCTCGAGGACGAAGAGTACT |
| | | GTAAGGCACTCGGTAAGGCTCTTGCAGATGTGAATAATG |
| | | GCCTTTATCCCCTCGGTGGAAAGAGCGCCATCGGCTACG |
| | | GACAGGTCAAGAGTCTGGGTATAAAGGGAGATGATAAG |
| | | AGGATTTCTCGCCTCATGAATCCTGCCTTTGATGAGACA |
| | | GATGTAGCCGTTCCAGAAAAGCCCAAAACTGATGCCGA |
| | | GGTTCGCATCGAGGCAGAGAAAGTATATTACCCACACTA |
| | | TTTCGTCGAACCCCATAAGAAGGTGGAACGCGAGGAGA |
| | | AACCCTGTGGTCATCAAAAGTTCCACGAGGGGCGACTG |
| | | ACAGGTAAAATTCGGTGTAAGCTCATTACCAAGACACCC |
| | | CTCATCGTCCCAGATACTAGTAATGACGATTTCTTCAGA |
| | | CCTGCGGATAAAGAAGCTCGGAAGGAAAAGGACGAATA |
| | | TCATAAATCATATGCTTTCTTCAGACTTCATAAACAAAT |
| | | CATGATTCCCGGGAGCGAATTGAGAGGAATGGTGAGTA |
| | | GTGTCTACGAAACTGTGACAAATTCTTGCTTCAGGATAT |
| | | TTGATGAGACTAAACGGTTGTCATGGCGGATGGATGCTG |
| | | ATCACCAGAATGTGCTGCAAAAGTTTCTCCCAGGTCGAG |
| | | TGACCGCCGATGGGAAACATATACAAAAGTTTTCCgggggt |
| | | gggtcaCGAACTGTAGACGATAGGATGATCGGCAAACGTA |
| | | TGAGCGCCGATCTGCGGCCGTGCCATGGAGATTGGGTGG |
| | | AAGATGGTGATCTCAGTGCCTTGAATGCATATCCCGAGA |
| | | AAAGACTCCTCTTGCGCCACCCCAAAGGACTCTGCCCTG |
| | | CTTGCCGGCTCTTTGGAACCGGATCTTACAAGGGCAGAG |
| | | TCAGGTTTGGATTCGCGTCACTCGAAAACGATCCGGAGT |
| | | GGCTGATCCCAGGCAAGAATCCCGGCGATCCGTTTCACG |
| | | GCGGGCCGGTGATGCTCTCATTGTTGGAACGGCCTCGCC |
| | | CGACTTGGAGTATACCGGGATCCGACAATAAGTTTAAAG |
| | | TGCCTGGCAGAAAGTTTTACGTCCACCACCACGCCTGGA |
| | | AAACCATTAAGGACGGGAACCATCCCACAACAGGCAAA |
| | | GCTATTGAACAAAGCCCTAATAACCGCACTGTAGAAGCT |
| | | CTCGCCGGCGGGAATTCCTTTAGCTTCGAAATTGCCTTT |
| | | GAGAACCTGAAAGAATGGGAGCTGGGTTTGCTCATCCA |
| | | CAGCCTGCAACTCGAAAAGGGTCTGGCGCATAAACTTG |
| | | GAATGGCAAAGTCTATGGGATTTGGTTCAGTTGAAATTG |
| | | ACGTCGAATCAGTGCGCCTGAGAAAAGATTGGAAGCAA |
| | | TGGCGGAATGGCAATTCCGAAATTCCCAACTGGTTGGGA |
| | | AAAGGATTTGCTAAACTGAAGGAATGGTTCCGGGACGA |
| | | GCTCGATTTTATAGAAAATCTTAAGAAACTTCTTTGGTTT |
| | | CCTGAGGGCGACCAAGCACCCCGGGTTTGCTACCCCATG |
| | | CTGCGAAAGAAGGACGATCCTAATGGGAATAGCGGTTA |
| | | CGAAGAACTCAAAAGAGGGGAATTCAAGAAAGAAGATC |
| | | GGCAGAAGAAGCTGACCACGCCGTGGACACCGTGGGCA |
| | | aaacggacagccgacggaagcgagttcgagtcaccaaagaagaagcggaaagtctaa |

[0243] Table 12 shows DNA sequences used as linkers.

| SEQ | | |
|---|---|---|
| ID NO | ID | Sequence |
| 203 | XTEN | tctggcagcgagacaccaggaacaagcgagtcag |
| | | caacaccagagagc |
| 204 | GS | ggatccggtgggtccggtagtggtggttccgggt |
| | | ccggtggaagt |

[0244] Table 13 shows guide sequences.

| SEQ | | |
|---|---|---|
| ID | | |
| NO | ID | Sequence |
| 91 | pDF0866 STAT3 | GTTGATGTCACGGAACagaaaatataaagtttctgaggagaattcaa |
| | guide 4 | |
| 205 | pDF0222 NT guide | GTTGATGTCACGGAACggtaatgcctggcttgtcgacgcatagtctg |
| | (for all sequences | |
| 206 | Lwa Guide 1 | ATTTAGACTACCCCAAAAACGAAGGGGACTtggctcacgcctgtaatg |
| | Cas13 | ccagcactttgag |
| 207 | Lwa Guide 2 | ATTTAGACTACCCCAAAAACGAAGGGGACTgtatccccaagagaaggc |
| | Cas13 | tccctgttggcca |
| 208 | Lwa Guide 3 | ATTTAGACTACCCCAAAAACGAAGGGGACTcaaaacctcaaaaaagat |
| | Cas13 | acatgcaggacct |
| 209 | Lwa Guide 4 | ATTTAGACTACCCCAAAAACGAAGGGGACTagaaaatataaagtttct |
| | Cas13 | gaggagaattcaa |
| 210 | Lwa Guide 5 | ATTTAGACTACCCCAAAAACGAAGGGGACTacaaaaaaacagaagtaa |
| | Cas13 | agaaagatttcct |
| 211 | Lwa Guide NT | ATTTAGACTACCCCAAAAACGAAGGGGACTggtccgctgccgttcgct |
| | Cas13 | tgggacatcctgt |
| 212 | Psp Guide 1 Cas13 | GTTGTGGAAGGTCCAGTTTTGAGGGGCTATtggctcacgcctgtaatg |
| | | ccagcactttgag |
| 213 | Psp Guide 2 Cas13 | GTTGTGGAAGGTCCAGTTTTGAGGGGCTATgtatccccaagagaaggc |
| | | tccctgttggcca |
| 214 | Psp Guide 3 Cas13 | GTTGTGGAAGGTCCAGTTTTGAGGGGCTATcaaaacctcaaaaaagat |
| | | acatgcaggacct |
| 215 | Psp Guide 4 Cas13 | GTTGTGGAAGGTCCAGTTTTGAGGGGCTATagaaaatataaagtttct |
| | | gaggagaattcaa |
| 216 | Psp Guide 5 Cas13 | GTTGTGGAAGGTCCAGTTTTGAGGGGCTATacaaaaaaacagaagtaa |
| | | agaaagatttcct |
| 217 | Psp Guide NT | GTTGTGGAAGGTCCAGTTTTGAGGGGCTATggtccgctgccgttcgct |
| | Cas13 | tgggacatcctgt |
| 218 | Rfx Guide 1 Cas13 | AACCCCTACCAACTGGTCGGGGTTTGAAACtggctcacgcctgtaatg |
| | | ccagcactttgag |
| 219 | Rfx Guide 2 Cas13 | AACCCCTACCAACTGGTCGGGGTTTGAAACgtatccccaagagaaggc |
| | | tccctgttggcca |
| 220 | Rfx Guide 3 Cas13 | AACCCCTACCAACTGGTCGGGGTTTGAAACcaaaacctcaaaaaagat |
| | | acatgcaggacct |
| 221 | Rfx Guide 4 Cas13 | AACCCCTACCAACTGGTCGGGGTTTGAAACagaaaatataaagtttct |
| | | gaggagaattcaa |
| 222 | Rfx Guide 5 Cas13 | AACCCCTACCAACTGGTCGGGGTTTGAAACacaaaaaaacagaagtaa |
| | | agaaagatttcct |
| 223 | Rfx Guide NT | AACCCCTACCAACTGGTCGGGGTTTGAAACggtccgctgccgttcgct |
| | Cas13 | tgggacatcctgt |
| 224 | PABPC1 targeting | GTTGATGTCACGGAACgtttcttccctcaaatgaaagtataaattgt |
| | guide | |
| 225 | pDF0868 PPIB | GTTGATGTCACGGAACgccaagggtgaggaggaggaagagggtgacc |
| | guide 4 | |
| 226 | TOP2A targeting | GTTGATGTCACGGAACtttaacaatatttattgagcacttgctatgt |
| | guide | |
| 227 | SHANK3 guide h | GTTGATGTCACGGAACaggcgccgggttggcaagtgggcagggaaca |
| 228 | PABPC1_5TS_guide_1 | GTTGATGTCACGGAACagtgtgtgatacttgaaaggtctagccatct |
| 229 | PABPC1_5TS_guide_2 | GTTGATGTCACGGAACctttatacaacttaggtcccacactagtgtg |
| 230 | PABPC1_5TS_guide_3 | GTTGATGTCACGGAACcgggggcttctggtatttgtctttgctttat |
| 231 | PABPC1_5TS_guide_4 | GTTGATGTCACGGAACgaattcttttatatgtgagaaatttcggggg |
| 232 | PPIB_5TS_guide_1 | GTTGATGTCACGGAACctcataggatttttaccgtcaccaaaatcag |
| 233 | PPIB_5TS_guide_2 | GTTGATGTCACGGAACgaaaagggtctggagctttcattagattctc |
| 234 | PPIB_5TS_guide_3 | GTTGATGTCACGGAACgggtatagataagcatgttttccaagaaaag |
| 235 | PPIB_5TS_guide_4 | GTTGATGTCACGGAACatattgttatcctgtagtccaaggagggtat |
| 236 | RPL41_5TS_guide_1 | GTTGATGTCACGGAACgaaaaacgtttgagtgttttctccctggagc |
| 237 | RPL41_5TS_guide_2 | GTTGATGTCACGGAACgaaatcttaaaagatctttaggagaaaaacg |
| 238 | RPL41_5TS_guide_3 | GTTGATGTCACGGAACcaaaacttaggagaaacatttggtttggaaa |
| 239 | RPL41_5TS_guide_4 | GTTGATGTCACGGAACcccaggaggagggaagttccttggacaaaac |
| 224 | pDF0874_PABPC1_ | GTTGATGTCACGGAACgtttcttccctcaaatgaaagtataaattgt |
| | 3TS_guide3 | |
| | (pDF0114 based) | |
| 240 | pDF0909 USF1 | GTTGATGTCACGGAACccaaaagtaggttcacactttggacctcatt |
| | guide | |
| 241 | AAV T single | GTTGATGTCACGGAACtgacagccattggtgaactcgtgccctgtgc |
| | vector HTT | |
| 205 | AAV NT single | GTTGATGTCACGGAACggtaatgcctggcttgtcgacgcatagtctg |
| | vector HTT | |
| 242 | AAV T single | GTTGATGTCACGGAACagaaggcgccgggttggcaagtgggcaggga |
| | vector SHANK3 | |
| 205 | AAV NT single | GTTGATGTCACGGAACggtaatgcctggcttgtcgacgcatagtctg |
| | vector SHANK3 | |
| 243 | SHANK3_guide_v2_1 | GTTGATGTCACGGAACgagcctagaaggcgccgggttggcaagtggg |
| 244 | SHANK3_guide_v2_2 | GTTGATGTCACGGAACcctagaaggcgccgggttggcaagtgggcag |
| 242 | SHANK3_guide_v2_3 | GTTGATGTCACGGAACagaaggcgccgggttggcaagtgggcaggga |
| 227 | SHANK3_guide_h | GTTGATGTCACGGAACaggcgccgggttggcaagtgggcagggaaca |
| 245 | SHANK3_guide_v2_4 | GTTGATGTCACGGAACcgccgggttggcaagtgggcagggaacagag |
| 246 | SHANK3_guide_v2_5 | GTTGATGTCACGGAACcgggttggcaagtgggcagggaacagagaca |
| 247 | SHANK3_guide_v2_6 | GTTGATGTCACGGAACgttggcaagtgggcagggaacagagacatgc |
| 248 | HTT_guide_2 | GTTGATGTCACGGAACcatggagtataacggtttattcatagtagtc |
| 249 | HTT_guide_v2_1 | GTTGATGTCACGGAACaccgttatactccatgttgcgggcagaatgg |
| 250 | HTT_guide_v2_2 | GTTGATGTCACGGAACtgttgcgggcagaatggggatctggacaggg |
| 251 | HTT_guide_v2_3 | GTTGATGTCACGGAACgatctggacagggaagcacagggcacgagtt |
| 241 | pDF0944 | GTTGATGTCACGGAACtgacagccattggtgaactcgtgccctgtgc |
| | HTT_guide_3 | |
| 252 | HTT_guide_v2_4 | GTTGATGTCACGGAACgagttcaccaatggctgtcaagctacgctgc |
| 253 | HTT_guide_v2_5 | GTTGATGTCACGGAACctgtcaagctacgctgctcacagaaaaaaca |
| 254 | HTT_guide_v2_6 | GTTGATGTCACGGAACctgctcacagaaaaaacagatgatgttacta |
| 255 | HTT_guide_4 | GTTGATGTCACGGAACtaaaatgggggaaatgaactgctttagtaac |
| 91 | Guides on Cargo | GTTGATGTCACGGAACagaaaatataaagtttctgaggagaattcaa |
| | plasmid STAT3 | |
| 225 | Guides on Cargo | GTTGATGTCACGGAACgccaagggtgaggaggaggaagagggtgacc |
| | plasmid PPIB | |
| 242 | SHANK3 g and c | GTTGATGTCACGGAACagaaggcgccgggttggcaagtgggcaggga |
| | lenti | |
| 256 | pDF0987_RPL41_ | GTTGATGTCACGGAACtccctcccacattaaatcaaacgtccacata |
| | Guide2 | |
| 241 | HTT g and c lenti | GTTGATGTCACGGAACtgacagccattggtgaactcgtgccctgtgc |
| 241 | HTT_guide3_cargo13_ | GTTGATGTCACGGAACtgacagccattggtgaactcgtgccctgtgc |
| | single vector | |
| | aRY1599 A1-3-5-7- | |
| | 10-11-12 | |
| 257 | 5ts and its | GTTGATGTCACGGAACctttactctgcaagataaggtcaacaaaatg |
| | USF1_g1 | |
| 258 | 5ts and its | GTTGATGTCACGGAACagaactaggatttcagatacccagcttgctt |
| | USF1_g2 | |
| 259 | 5ts and its | GTTGATGTCACGGAACggttcacactttggacctcattttcatctaa |
| | USF1_g3 | |
| 260 | 5ts and its | GTTGATGTCACGGAACgatacaggaacctcagggagagataagacta |
| | USF1_g4 | |
| 261 | 5ts and its | GTTGATGTCACGGAACaataccaggaggcagaattcaggcatcctgc |
| | USF1_g5 | |
| 205 | 5ts and its | GTTGATGTCACGGAACggtaatgcctggcttgtcgacgcatagtctg |
| | USF1_g6 | |

[0245] Table 14 shows cargo sequences.

| SEQ | | | |
|---|---|---|---|
| ID NO | ID | Sequence | Length |
| 262 | STAT3_3TS_ | gaacagaaaatataaagtttctgaggagaattcaaatgaagccaaaacctcaaaaa | 288 |
| | CARGO2_ | agatacatgcaggacctgcaggcagtatccccaagagaaggctccctgttggccagg | |
| | primelike_ | tgcagtggctcacgcctgtaatgccagcactttgagaacgaggaattctcttctttttttt | |
| | subsAT | ctgcaggTtctagaacagaaaatgaaagtggtagagaatctccaggatgactttgat | |
| | | ttcaactataaaaccctcaagagtcaaggaGACTACAAAGACGATGACGAC | |
| | | AAGTAA | |
| 263 | STAT3_3TS_ | gaacagaaaatataaagtttctgaggagaattcaaatgaagccaaaacctcaaaaa | 288 |
| | CARGO2_ | agatacatgcaggacctgcaggcagtatccccaagagaaggctccctgttggccagg | |
| | primelike_ | tgcagtggctcacgcctgtaatgccagcactttgagaacgaggaattctcttctttttttt | |
| | subsAC | ctgcaggCtctagaacagaaaatgaaagtggtagagaatctccaggatgactttgat | |
| | | ttcaactataaaaccctcaagagtcaaggaGACTACAAAGACGATGACGAC | |
| | | AAGTAA | |
| 264 | STAT3_3TS_ | gaacagaaaatataaagtttctgaggagaattcaaatgaagccaaaacctcaaaaa | 288 |
| | CARGO2_ | agatacatgcaggacctgcaggcagtatccccaagagaaggctccctgttggccagg | |
| | primelike_ | tgcagtggctcacgcctgtaatgccagcactttgagaacgaggaattctcttctttttttt | |
| | subsAG | ctgcaggGtctagaacagaaaatgaaagtggtagagaatctccaggatgactttgat | |
| | | ttcaactataaaaccctcaagagtcaaggaGACTACAAAGACGATGACGAC | |
| | | AAGTAA | |
| 265 | STAT3_3TS_ | gaacagaaaatataaagtttctgaggagaattcaaatgaagccaaaacctcaaaaa | 288 |
| | CARGO2_ | agatacatgcaggacctgcaggcagtatccccaagagaaggctccctgttggccagg | |
| | primelike_ | tgcagtggctcacgcctgtaatgccagcactttgagaacgaggaattctcttctttttttt | |
| | subsTA | ctgcaggaActagaacagaaaatgaaagtggtagagaatctccaggatgactttgat | |
| | | ttcaactataaaaccctcaagagtcaaggaGACTACAAAGACGATGACGAC | |
| | | AAGTAA | |
| 266 | STAT3_3TS_ | gaacagaaaatataaagtttctgaggagaattcaaatgaagccaaaacctcaaaaa | 288 |
| | CARGO2_ | agatacatgcaggacctgcaggcagtatccccaagagaaggctccctgttggccagg | |
| | primelike_ | tgcagtggctcacgcctgtaatgccagcactttgagaacgaggaattctcttctttttttt | |
| | subsTC | ctgcaggaCctagaacagaaaatgaaagtggtagagaatctccaggatgactttgat | |
| | | ttcaactataaaaccctcaagagtcaaggaGACTACAAAGACGATGACGAC | |
| | | AAGTAA | |
| 267 | STAT3_3TS_ | gaacagaaaatataaagtttctgaggagaattcaaatgaagccaaaacctcaaaaa | 288 |
| | CARGO2_ | agatacatgcaggacctgcaggcagtatccccaagagaaggctccctgttggccagg | |
| | primelike_ | tgcagtggctcacgcctgtaatgccagcactttgagaacgaggaattctcttctttttttt | |
| | subsTG | ctgcaggaGctagaacagaaaatgaaagtggtagagaatctccaggatgactttgat | |
| | | ttcaactataaaaccctcaagagtcaaggaGACTACAAAGACGATGACGAC | |
| | | AAGTAA | |
| 268 | STAT3_3TS_ | gaacagaaaatataaagtttctgaggagaattcaaatgaagccaaaacctcaaaaa | 288 |
| | CARGO2_ | agatacatgcaggacctgcaggcagtatccccaagagaaggctccctgttggccagg | |
| | primelike_ | tgcagtggctcacgcctgtaatgccagcactttgagaacgaggaattctcttctttttttt | |
| | subsCT | ctgcaggatTtagaacagaaaatgaaagtggtagagaatctccaggatgactttgat | |
| | | ttcaactataaaaccctcaagagtcaaggaGACTACAAAGACGATGACGAC | |
| | | AAGTAA | |
| 269 | STAT3_3TS_ | gaacagaaaatataaagtttctgaggagaattcaaatgaagccaaaacctcaaaaa | 288 |
| | CARGO2_ | agatacatgcaggacctgcaggcagtatccccaagagaaggctccctgttggccagg | |
| | primelike_ | tgcagtggctcacgcctgtaatgccagcactttgagaacgaggaattctcttctttttttt | |
| | subsCG | ctgcaggatGtagaacagaaaatgaaagtggtagagaatctccaggatgactttgat | |
| | | ttcaactataaaaccctcaagagtcaaggaGACTACAAAGACGATGACGAC | |
| | | AAGTAA | |
| 270 | STAT3_3TS_ | gaacagaaaatataaagtttctgaggagaattcaaatgaagccaaaacctcaaaaa | 288 |
| | CARGO2_ | agatacatgcaggacctgcaggcagtatccccaagagaaggctccctgttggccagg | |
| | primelike_ | tgcagtggctcacgcctgtaatgccagcactttgagaacgaggaattctcttctttttttt | |
| | subsCA | ctgcaggatAtagaacagaaaatgaaagtggtagagaatctccaggatgactttgat | |
| | | ttcaactataaaaccctcaagagtcaaggaGACTACAAAGACGATGACGAC | |
| | | AAGTAA | |
| 271 | STAT3_3TS_ | gaacagaaaatataaagtttctgaggagaattcaaatgaagccaaaacctcaaaaa | 288 |
| | CARGO2_ | agatacatgcaggacctgcaggcagtatccccaagagaaggctccctgttggccagg | |
| | primelike_ | tgcagtggctcacgcctgtaatgccagcactttgagaacgaggaattctcttctttttttt | |
| | subsGA | ctgcagAatctagaacagaaaatgaaagtggtagagaatctccaggatgactttgat | |
| | | ttcaactataaaaccctcaagagtcaaggaGACTACAAAGACGATGACGAC | |
| | | AAGTAA | |
| 272 | STAT3_3TS_ | gaacagaaaatataaagtttctgaggagaattcaaatgaagccaaaacctcaaaaa | 288 |
| | CARGO2_ | agatacatgcaggacctgcaggcagtatccccaagagaaggctccctgttggccagg | |
| | primelike_ | tgcagtggctcacgcctgtaatgccagcactttgagaacgaggaattctcttctttttttt | |
| | subsGT | ctgcagTatctagaacagaaaatgaaagtggtagagaatctccaggatgactttgat | |
| | | ttcaactataaaaccctcaagagtcaaggaGACTACAAAGACGATGACGAC | |
| | | AAGTAA | |
| 273 | STAT3_3TS_ | gaacagaaaatataaagtttctgaggagaattcaaatgaagccaaaacctcaaaaa | 288 |
| | CARGO2_ | agatacatgcaggacctgcaggcagtatccccaagagaaggctccctgttggccagg | |
| | primelike_ | tgcagtggctcacgcctgtaatgccagcactttgagaacgaggaattctcttctttttttt | |
| | subsGC | ctgcagCatctagaacagaaaatgaaagtggtagagaatctccaggatgactttgat | |
| | | ttcaactataaaaccctcaagagtcaaggaGACTACAAAGACGATGACGAC | |
| | | AAGTAA | |
| 274 | STAT3_3TS_ | gaacagaaaatataaagtttctgaggagaattcaaatgaagccaaaacctcaaaaa | 288 |
| | CARGO2_ | agatacatgcaggacctgcaggcagtatccccaagagaaggctccctgttggccagg | |
| | primelike_ | tgcagtggctcacgcctgtaatgccagcactttgagaacgaggaattctcttctttttttt | |
| | 1aachange | ctgcaggatAAGgaacagaaaatgaaagtggtagagaatctccaggatgactttga | |
| | | tttcaactataaaaccctcaagagtcaaggaGACTACAAAGACGATGACGA | |
| | | CAAGTAA | |
| 275 | STAT3_3TS_ | gaacagaaaatataaagtttctgaggagaattcaaatgaagccaaaacctcaaaaa | 288 |
| | CARGO2_ | agatacatgcaggacctgcaggcagtatccccaagagaaggctccctgttggccagg | |
| | primelike_ | tgcagtggctcacgcctgtaatgccagcactttgagaacgaggaattctcttctttttttt | |
| | 2aachange | ctgcaggatAAGTCAcagaaaatgaaagtggtagagaatctccaggatgactttg | |
| | | atttcaactataaaaccctcaagagtcaaggaGACTACAAAGACGATGACG | |
| | | ACAAGTAA | |
| 276 | STAT3_3TS_ | gaacagaaaatataaagtttctgaggagaattcaaatgaagccaaaacctcaaaaa | 288 |
| | CARGO2_ | agatacatgcaggacctgcaggcagtatccccaagagaaggctccctgttggccagg | |
| | primelike_ | tgcagtggctcacgcctgtaatgccagcactttgagaacgaggaattctcttctttttttt | |
| | 3aachange | ctgcaggatAAGTCAGCAaaaatgaaagtggtagagaatctccaggatgactttg | |
| | | atttcaactataaaaccctcaagagtcaaggaGACTACAAAGACGATGACG | |
| | | ACAAGTAA | |
| 277 | STAT3_3TS_ | gaacagaaaatataaagtttctgaggagaattcaaatgaagccaaaacctcaaaaa | 289 |
| | CARGO2_ | agatacatgcaggacctgcaggcagtatccccaagagaaggctccctgttggccagg | |
| | primelike_ | tgcagtggctcacgcctgtaatgccagcactttgagaacgaggaattctcttctttttttt | |
| | frameshiftcorr1bp | ctgcaggaAtctagaacagaaaatgaaagtggtagagaatctccaggatgactttga | |
| | | tttcaactataaaaccctcaagagtcaaggaGACTACAAAGACGATGACGA | |
| | | CAAGTAA | |
| 278 | STAT3_3TS_ | gaacagaaaatataaagtttctgaggagaattcaaatgaagccaaaacctcaaaaa | 290 |
| | CARGO2_ | agatacatgcaggacctgcaggcagtatccccaagagaaggctccctgttggccagg | |
| | primelike_ | tgcagtggctcacgcctgtaatgccagcactttgagaacgaggaattctcttctttttttt | |
| | frameshiftcorr2bp | ctgcaggaAGtctagaacagaaaatgaaagtggtagagaatctccaggatgacttt | |
| | | gatttcaactataaaaccctcaagagtcaaggaGACTACAAAGACGATGAC | |
| | | GACAAGTAA | |
| 279 | STAT3_3TS_ | gaacagaaaatataaagtttctgaggagaattcaaatgaagccaaaacctcaaaaa | 294 |
| | CARGO2_ | agatacatgcaggacctgcaggcagtatccccaagagaaggctccctgttggccagg | |
| | primelike_6ins | tgcagtggctcacgcctgtaatgccagcactttgagaacgaggaattctcttctttttttt | |
| | | ctgcaggatTTGCACctagaacagaaaatgaaagtggtagagaatctccaggatg | |
| | | actttgatttcaactataaaaccctcaagagtcaaggaGACTACAAAGACGAT | |
| | | GACGACAAGTAA | |
| 280 | STAT3_3TS_ | gaacagaaaatataaagtttctgaggagaattcaaatgaagccaaaacctcaaaaa | 300 |
| | CARGO2_ | agatacatgcaggacctgcaggcagtatccccaagagaaggctccctgttggccagg | |
| | primelike_12ins | tgcagtggctcacgcctgtaatgccagcactttgagaacgaggaattctcttctttttttt | |
| | | ctgcaggatTTGCACATTGCGctagaacagaaaatgaaagtggtagagaatctc | |
| | | caggatgactttgatttcaactataaaaccctcaagagtcaaggaGACTACAAAG | |
| | | ACGATGACGACAAGTAA | |
| 281 | STAT3_3TS_ | gaacagaaaatataaagtttctgaggagaattcaaatgaagccaaaacctcaaaaa | 312 |
| | CARGO2_ | agatacatgcaggacctgcaggcagtatccccaagagaaggctccctgttggccagg | |
| | primelike_24ins | tgcagtggctcacgcctgtaatgccagcactttgagaacgaggaattctcttctttttttt | |
| | | ctgcaggatTTGCACATTGCGTCAACTCATAAGctagaacagaaaatgaa | |
| | | agtggtagagaatctccaggatgactttgatttcaactataaaaccctcaagagtcaa | |
| | | ggaGACTACAAAGACGATGACGACAAGTAA | |
| 282 | STAT3_3TS_ | gaacagaaaatataaagtttctgaggagaattcaaatgaagccaaaacctcaaaaa | 336 |
| | CARGO2_ | agatacatgcaggacctgcaggcagtatccccaagagaaggctccctgttggccagg | |
| | primelike_48ins | tgcagtggctcacgcctgtaatgccagcactttgagaacgaggaattctcttctttttttt | |
| | | ctgcaggatTTGCACATTGCGTCAACTCATAAGATGTCTCAACGGCA | |
| | | TGCGCAACTTctagaacagaaaatgaaagtggtagagaatctccaggatgacttt | |
| | | gatttcaactataaaaccctcaagagtcaaggaGACTACAAAGACGATGAC | |
| | | GACAAGTAA | |
| 283 | STAT3_3TS_ | gaacagaaaatataaagtttctgaggagaattcaaatgaagccaaaacctcaaaaa | 384 |
| | CARGO2_ | agatacatgcaggacctgcaggcagtatccccaagagaaggctccctgttggccagg | |
| | primelike_96ins | tgcagtggctcacgcctgtaatgccagcactttgagaacgaggaattctcttctttttttt | |
| | | ctgcaggatTTGCACATTGCGTCAACTCATAAGATGTCTCAACGGCA | |
| | | TGCGCAACTTGTGAAGTGTCTACTATCCTTAAACGCATATCTCGC | |
| | | ACAGTATCTCCCGctagaacagaaaatgaaagtggtagagaatctccaggatg | |
| | | actttgatttcaactataaaaccctcaagagtcaaggaGACTACAAAGACGAT | |
| | | GACGACAAGTAA | |
| 284 | STAT3_3TS_ | gaacagaaaatataaagtttctgaggagaattcaaatgaagccaaaacctcaaaaa | 276 |
| | CARGO2_ | agatacatgcaggacctgcaggcagtatccccaagagaaggctccctgttggccagg | |
| | primelike_12del | tgcagtggctcacgcctgtaatgccagcactttgagaacgaggaattctcttctttttttt | |
| | | ctgcagaaaatgaaagtggtagagaatctccaggatgactttgatttcaactataaaa | |
| | | ccctcaagagtcaaggaGACTACAAAGACGATGACGACAAGTAA | |
| 285 | STAT3_primelike_ | gaacagaaaatataaagtttctgaggagaattcaaatgaagccaaaacctcaaaaa | 288 |
| | v2_v10 | agatacatgcaggacctgcaggcagtatccccaagagaaggctccctgttggccagg | |
| | | tgcagtggctcacgcctgtaatgccagcactttgagaacgaggaattctcttctttttttt | |
| | | ctgcaggatctaAaacagaaaatgaaagtggtagagaatctccaggatgactttgat | |
| | | ttcaactataaaaccctcaagagtcaaggaGACTACAAAGACGATGACGAC | |
| | | AAGTAA | |
| 286 | STAT3_primelike_ | gaacagaaaatataaagtttctgaggagaattcaaatgaagccaaaacctcaaaaa | 288 |
| | v2_v11 | agatacatgcaggacctgcaggcagtatccccaagagaaggctccctgttggccagg | |
| | | tgcagtggctcacgcctgtaatgccagcactttgagaacgaggaattctcttctttttttt | |
| | | ctgcaggatctaTaacagaaaatgaaagtggtagagaatctccaggatgactttgat | |
| | | ttcaactataaaaccctcaagagtcaaggaGACTACAAAGACGATGACGAC | |
| | | AAGTAA | |
| 287 | STAT3_primelike_ | gaacagaaaatataaagtttctgaggagaattcaaatgaagccaaaacctcaaaaa | 288 |
| | v2_v12 | agatacatgcaggacctgcaggcagtatccccaagagaaggctccctgttggccagg | |
| | | tgcagtggctcacgcctgtaatgccagcactttgagaacgaggaattctcttctttttttt | |
| | | ctgcaggatctaCaacagaaaatgaaagtggtagagaatctccaggatgactttgat | |
| | | ttcaactataaaaccctcaagagtcaaggaGACTACAAAGACGATGACGAC | |
| | | AAGTAA | |
| 288 | PPIB_primelike_ | atgtggcttctcagggacattgcgttcagctgcactctgtatacctcaggggtgggacc | 328 |
| | v1 | agcacgtcactgagtgaaggaggggagggaggctctggcagttgtgcagccttcctg | |
| | | gctgggctctgagggggctggaagaatttagaacaacgaggaattctcttcttttttttc | |
| | | tgcagAaggtggtgcggaaggtggagagcaccaagacagacagccgggataaacc | |
| | | cctgaaggatgtgatcatcgcagactgcggcaagatcgaggtggagaagccctttgc | |
| | | catcgccaaggagGACTACAAAGACGATGACGACAAGTAA | |
| 289 | PPIB_primelike_ | atgtggcttctcagggacattgcgttcagctgcactctgtatacctcaggggtgggacc | 328 |
| | v2 | agcacgtcactgagtgaaggaggggagggaggctctggcagttgtgcagccttcctg | |
| | | gctgggctctgagggggctggaagaatttagaacaacgaggaattctcttcttttttttc | |
| | | tgcagTaggtggtgcggaaggtggagagcaccaagacagacagccgggataaacc | |
| | | cctgaaggatgtgatcatcgcagactgcggcaagatcgaggtggagaagccctttgc | |
| | | catcgccaaggagGACTACAAAGACGATGACGACAAGTAA | |
| 290 | PPIB_primelike_ | atgtggcttctcagggacattgcgttcagctgcactctgtatacctcaggggtgggacc | 328 |
| | v3 | agcacgtcactgagtgaaggaggggagggaggctctggcagttgtgcagccttcctg | |
| | | gctgggctctgagggggctggaagaatttagaacaacgaggaattctcttcttttttttc | |
| | | tgcagCaggtggtgcggaaggtggagagcaccaagacagacagccgggataaacc | |
| | | cctgaaggatgtgatcatcgcagactgcggcaagatcgaggtggagaagccctttgc | |
| | | catcgccaaggagGACTACAAAGACGATGACGACAAGTAA | |
| 291 | PPIB_primelike_ | atgtggcttctcagggacattgcgttcagctgcactctgtatacctcaggggtgggacc | 328 |
| | v4 | agcacgtcactgagtgaaggaggggagggaggctctggcagttgtgcagccttcctg | |
| | | gctgggctctgagggggctggaagaatttagaacaacgaggaattctcttcttttttttc | |
| | | tgcaggTggtggtgcggaaggtggagagcaccaagacagacagccgggataaacc | |
| | | cctgaaggatgtgatcatcgcagactgcggcaagatcgaggtggagaagccctttgc | |
| | | catcgccaaggagGACTACAAAGACGATGACGACAAGTAA | |
| 292 | PPIB_primelike_ | atgtggcttctcagggacattgcgttcagctgcactctgtatacctcaggggtgggacc | 328 |
| | v5 | agcacgtcactgagtgaaggaggggagggaggctctggcagttgtgcagccttcctg | |
| | | gctgggctctgagggggctggaagaatttagaacaacgaggaattctcttcttttttttc | |
| | | tgcaggCggtggtgcggaaggtggagagcaccaagacagacagccgggataaacc | |
| | | cctgaaggatgtgatcatcgcagactgcggcaagatcgaggtggagaagccctttgc | |
| | | catcgccaaggagGACTACAAAGACGATGACGACAAGTAA | |
| 293 | PPIB_primelike_ | atgtggcttctcagggacattgcgttcagctgcactctgtatacctcaggggtgggacc | 328 |
| | v6 | agcacgtcactgagtgaaggaggggagggaggctctggcagttgtgcagccttcctg | |
| | | gctgggctctgagggggctggaagaatttagaacaacgaggaattctcttcttttttttc | |
| | | tgcaggGggtggtgcggaaggtggagagcaccaagacagacagccgggataaacc | |
| | | cctgaaggatgtgatcatcgcagactgcggcaagatcgaggtggagaagccctttgc | |
| | | catcgccaaggagGACTACAAAGACGATGACGACAAGTAA | |
| 294 | PPIB_primelike_ | atgtggcttctcagggacattgcgttcagctgcactctgtatacctcaggggtgggacc | 328 |
| | v7 | agcacgtcactgagtgaaggaggggagggaggctctggcagttgtgcagccttcctg | |
| | | gctgggctctgagggggctggaagaatttagaacaacgaggaattctcttcttttttttc | |
| | | tgcaggaggAggtgcggaaggtggagagcaccaagacagacagccgggataaacc | |
| | | cctgaaggatgtgatcatcgcagactgcggcaagatcgaggtggagaagccctttgc | |
| | | catcgccaaggagGACTACAAAGACGATGACGACAAGTAA | |
| 295 | PPIB_primelike_ | atgtggcttctcagggacattgcgttcagctgcactctgtatacctcaggggtgggacc | 328 |
| | v8 | agcacgtcactgagtgaaggaggggagggaggctctggcagttgtgcagccttcctg | |
| | | gctgggctctgagggggctggaagaatttagaacaacgaggaattctcttcttttttttc | |
| | | tgcaggaggCggtgcggaaggtggagagcaccaagacagacagccgggataaacc | |
| | | cctgaaggatgtgatcatcgcagactgcggcaagatcgaggtggagaagccctttgc | |
| | | catcgccaaggagGACTACAAAGACGATGACGACAAGTAA | |
| 296 | PPIB_primelike_ | atgtggcttctcagggacattgcgttcagctgcactctgtatacctcaggggtgggacc | 328 |
| | v9 | agcacgtcactgagtgaaggaggggagggaggctctggcagttgtgcagccttcctg | |
| | | gctgggctctgagggggctggaagaatttagaacaacgaggaattctcttcttttttttc | |
| | | tgcaggaggGggtgcggaaggtggagagcaccaagacagacagccgggataaacc | |
| | | cctgaaggatgtgatcatcgcagactgcggcaagatcgaggtggagaagccctttgc | |
| | | catcgccaaggagGACTACAAAGACGATGACGACAAGTAA | |
| 297 | PPIB_primelike_ | atgtggcttctcagggacattgcgttcagctgcactctgtatacctcaggggtgggacc | 328 |
| | v10 | agcacgtcactgagtgaaggaggggagggaggctctggcagttgtgcagccttcctg | |
| | | gctgggctctgagggggctggaagaatttagaacaacgaggaattctcttcttttttttc | |
| | | tgcaggaggtggtgTggaaggtggagagcaccaagacagacagccgggataaacc | |
| | | cctgaaggatgtgatcatcgcagactgcggcaagatcgaggtggagaagccctttgc | |
| | | catcgccaaggagGACTACAAAGACGATGACGACAAGTAA | |
| 298 | PPIB_primelike_ | atgtggcttctcagggacattgcgttcagctgcactctgtatacctcaggggtgggacc | 328 |
| | v11 | agcacgtcactgagtgaaggaggggagggaggctctggcagttgtgcagccttcctg | |
| | | gctgggctctgagggggctggaagaatttagaacaacgaggaattctcttcttttttttc | |
| | | tgcaggaggtggtgGggaaggtggagagcaccaagacagacagccgggataaacc | |
| | | cctgaaggatgtgatcatcgcagactgcggcaagatcgaggtggagaagccctttgc | |
| | | catcgccaaggagGACTACAAAGACGATGACGACAAGTAA | |
| 299 | PPIB_primelike_ | atgtggcttctcagggacattgcgttcagctgcactctgtatacctcaggggtgggacc | 328 |
| | v12 | agcacgtcactgagtgaaggaggggagggaggctctggcagttgtgcagccttcctg | |
| | | gctgggctctgagggggctggaagaatttagaacaacgaggaattctcttcttttttttc | |
| | | tgcaggaggtggtgAggaaggtggagagcaccaagacagacagccgggataaacc | |
| | | cctgaaggatgtgatcatcgcagactgcggcaagatcgaggtggagaagccctttgc | |
| | | catcgccaaggagGACTACAAAGACGATGACGACAAGTAA | |
| 300 | PPIB_primelike_ | atgtggcttctcagggacattgcgttcagctgcactctgtatacctcaggggtgggacc | 328 |
| | v13 | agcacgtcactgagtgaaggaggggagggaggctctggcagttgtgcagccttcctg | |
| | | gctgggctctgagggggctggaagaatttagaacaacgaggaattctcttcttttttttc | |
| | | tgcaggaAgtggtgcggaaggtggagagcaccaagacagacagccgggataaacc | |
| | | cctgaaggatgtgatcatcgcagactgcggcaagatcgaggtggagaagccctttgc | |
| | | catcgccaaggagGACTACAAAGACGATGACGACAAGTAA | |
| 301 | PPIB_primelike_ | atgtggcttctcagggacattgcgttcagctgcactctgtatacctcaggggtgggacc | 328 |
| | v14 | agcacgtcactgagtgaaggaggggagggaggctctggcagttgtgcagccttcctg | |
| | | gctgggctctgagggggctggaagaatttagaacaacgaggaattctcttcttttttttc | |
| | | tgcaggaTgtggtgcggaaggtggagagcaccaagacagacagccgggataaacc | |
| | | cctgaaggatgtgatcatcgcagactgcggcaagatcgaggtggagaagccctttgc | |
| | | catcgccaaggagGACTACAAAGACGATGACGACAAGTAA | |
| 302 | PPIB_primelike_ | atgtggcttctcagggacattgcgttcagctgcactctgtatacctcaggggtgggacc | 328 |
| | v15 | agcacgtcactgagtgaaggaggggagggaggctctggcagttgtgcagccttcctg | |
| | | gctgggctctgagggggctggaagaatttagaacaacgaggaattctcttcttttttttc | |
| | | tgcaggaCgtggtgcggaaggtggagagcaccaagacagacagccgggataaacc | |
| | | cctgaaggatgtgatcatcgcagactgcggcaagatcgaggtggagaagccctttgc | |
| | | catcgccaaggagGACTACAAAGACGATGACGACAAGTAA | |
| 303 | PPIB_primelike_ | atgtggcttctcagggacattgcgttcagctgcactctgtatacctcaggggtgggacc | 328 |
| | v16 | agcacgtcactgagtgaaggaggggagggaggctctggcagttgtgcagccttcctg | |
| | | gctgggctctgagggggctggaagaatttagaacaacgaggaattctcttcttttttttc | |
| | | tgcagGCAgtggtgcggaaggtggagagcaccaagacagacagccgggataaacc | |
| | | cctgaaggatgtgatcatcgcagactgcggcaagatcgaggtggagaagccctttgc | |
| | | catcgccaaggagGACTACAAAGACGATGACGACAAGTAA | |
| 304 | PPIB_primelike_ | atgtggcttctcagggacattgcgttcagctgcactctgtatacctcaggggtgggacc | 328 |
| | v17 | agcacgtcactgagtgaaggaggggagggaggctctggcagttgtgcagccttcctg | |
| | | gctgggctctgagggggctggaagaatttagaacaacgaggaattctcttcttttttttc | |
| | | tgcagGCACCGgtgcggaaggtggagagcaccaagacagacagccgggataaac | |
| | | ccctgaaggatgtgatcatcgcagactgcggcaagatcgaggtggagaagccctttg | |
| | | ccatcgccaaggagGACTACAAAGACGATGACGACAAGTAA | |
| 305 | PPIB_primelike_ | atgtggcttctcagggacattgcgttcagctgcactctgtatacctcagggggggacc | 328 |
| | v18 | agcacgtcactgagtgaaggaggggagggaggctctggcagttgtgcagccttcctg | |
| | | gctgggctctgagggggctggaagaatttagaacaacgaggaattctcttcttttttttc | |
| | | tgcagGCACCGACCcggaaggtggagagcaccaagacagacagccgggataaa | |
| | | cccctgaaggatgtgatcatcgcagactgcggcaagatcgaggtggagaagcccttt | |
| | | gccatcgccaaggagGACTACAAAGACGATGACGACAAGTAA | |
| 306 | PPIB_primelike_ | atgtggcttctcagggacattgcgttcagctgcactctgtatacctcaggggtgggacc | 329 |
| | v19 | agcacgtcactgagtgaaggaggggagggaggctctggcagttgtgcagccttcctg | |
| | | gctgggctctgagggggctggaagaatttagaacaacgaggaattctcttcttttttttc | |
| | | tgcaggagAgtggtgcggaaggtggagagcaccaagacagacagccgggataaac | |
| | | ccctgaaggatgtgatcatcgcagactgcggcaagatcgaggtggagaagccctttg | |
| | | ccatcgccaaggagGACTACAAAGACGATGACGACAAGTAA | |
| 307 | PPIB_primelike_ | atgtggcttctcagggacattgcgttcagctgcactctgtatacctcaggggtgggacc | 330 |
| | v20 | agcacgtcactgagtgaaggaggggagggaggctctggcagttgtgcagccttcctg | |
| | | gctgggctctgagggggctggaagaatttagaacaacgaggaattctcttcttttttttc | |
| | | tgcaggagAGgtggtgcggaaggtggagagcaccaagacagacagccgggataaa | |
| | | cccctgaaggatgtgatcatcgcagactgcggcaagatcgaggtggagaagcccttt | |
| | | gccatcgccaaggagGACTACAAAGACGATGACGACAAGTAA | |
| 308 | PPIB_primelike_ | atgtggcttctcagggacattgcgttcagctgcactctgtatacctcaggggtgggacc | 334 |
| | v21 | agcacgtcactgagtgaaggaggggagggaggctctggcagttgtgcagccttcctg | |
| | | gctgggctctgagggggctggaagaatttagaacaacgaggaattctcttcttttttttc | |
| | | tgcaggagTTGCACgtggtgcggaaggtggagagcaccaagacagacagccggg | |
| | | ataaacccctgaaggatgtgatcatcgcagactgcggcaagatcgaggtggagaagc | |
| | | cctttgccatcgccaaggagGACTACAAAGACGATGACGACAAGTAA | |
| 309 | PPIB_primelike_ | atgtggcttctcagggacattgcgttcagctgcactctgtatacctcaggggtgggacc | 340 |
| | v22 | agcacgtcactgagtgaaggaggggagggaggctctggcagttgtgcagccttcctg | |
| | | gctgggctctgagggggctggaagaatttagaacaacgaggaattctcttcttttttttc | |
| | | tgcaggagTTGCACATTGCGgtggtgcggaaggtggagagcaccaagacagac | |
| | | agccgggataaacccctgaaggatgtgatcatcgcagactgcggcaagatcgaggtg | |
| | | gagaagccctttgccatcgccaaggagGACTACAAAGACGATGACGACAA | |
| | | GTAA | |
| 310 | PPIB_primelike_ | atgtggcttctcagggacattgcgttcagctgcactctgtatacctcaggggtgggacc | 352 |
| | v23 | agcacgtcactgagtgaaggaggggagggaggctctggcagttgtgcagccttcctg | |
| | | gctgggctctgagggggctggaagaatttagaacaacgaggaattctcttcttttttttc | |
| | | tgcaggagTTGCACATTGCGTCAACTCATAAGgtggtgcggaaggtggag | |
| | | agcaccaagacagacagccgggataaacccctgaaggatgtgatcatcgcagactg | |
| | | cggcaagatcgaggtggagaagccctttgccatcgccaaggagGACTACAAAG | |
| | | ACGATGACGACAAGTAA | |
| 311 | PPIB_primelike_ | atgtggcttctcagggacattgcgttcagctgcactctgtatacctcaggggtgggacc | 376 |
| | v24 | agcacgtcactgagtgaaggaggggagggaggctctggcagttgtgcagccttcctg | |
| | | gctgggctctgagggggctggaagaatttagaacaacgaggaattctcttcttttttttc | |
| | | tgcaggagTTGCACATTGCGTCAACTCATAAGATGTCTCAACGGCAT | |
| | | GCGCAACTTgtggtgcggaaggtggagagcaccaagacagacagccgggataa | |
| | | acccctgaaggatgtgatcatcgcagactgcggcaagatcgaggtggagaagccctt | |
| | | tgccatcgccaaggagGACTACAAAGACGATGACGACAAGTAA | |
| 312 | PPIB_primelike_ | atgtggcttctcagggacattgcgttcagctgcactctgtatacctcaggggtgggacc | 424 |
| | v25 | agcacgtcactgagtgaaggaggggagggaggctctggcagttgtgcagccttcctg | |
| | | gctgggctctgagggggctggaagaatttagaacaacgaggaattctcttcttttttttc | |
| | | tgcaggagTTGCACATTGCGTCAACTCATAAGATGTCTCAACGGCAT | |
| | | GCGCAACTTGTGAAGTGTCTACTATCCTTAAACGCATATCTCGCA | |
| | | CAGTATCTCCCGgtggtgcggaaggtggagagcaccaagacagacagccggga | |
| | | taaacccctgaaggatgtgatcatcgcagactgcggcaagatcgaggtggagaagcc | |
| | | ctttgccatcgccaaggagGACTACAAAGACGATGACGACAAGTAA | |
| 313 | PPIB_primelike_ | atgtggcttctcagggacattgcgttcagctgcactctgtatacctcaggggtgggacc | 322 |
| | v26 | agcacgtcactgagtgaaggaggggagggaggctctggcagttgtgcagccttcctg | |
| | | gctgggctctgagggggctggaagaatttagaacaacgaggaattctcttcttttttttc | |
| | | tgcaggagcggaaggtggagagcaccaagacagacagccgggataaacccctgaa | |
| | | ggatgtgatcatcgcagactgcggcaagatcgaggtggagaagccctttgccatcgc | |
| | | caaggagGACTACAAAGACGATGACGACAAGTAA | |
| 314 | PPIB_primelike_ | atgtggcttctcagggacattgcgttcagctgcactctgtatacctcaggggtgggacc | 316 |
| | v27 | agcacgtcactgagtgaaggaggggagggaggctctggcagttgtgcagccttcctg | |
| | | gctgggctctgagggggctggaagaatttagaacaacgaggaattctcttcttttttttc | |
| | | tgcaggaggtggagagcaccaagacagacagccgggataaacccctgaaggatgtg | |
| | | atcatcgcagactgcggcaagatcgaggtggagaagccctttgccatcgccaaggag | |
| | | GACTACAAAGACGATGACGACAAGTAA | |
| 315 | PPIB_primelike_ | atgtggcttctcagggacattgcgttcagctgcactctgtatacctcagggggggacc | 304 |
| | v28 | agcacgtcactgagtgaaggaggggagggaggctctggcagttgtgcagccttcctg | |
| | | gctgggctctgagggggctggaagaatttagaacaacgaggaattctcttcttttttttc | |
| | | tgcaggagaagacagacagccgggataaacccctgaaggatgtgatcatcgcagac | |
| | | tgcggcaagatcgaggtggagaagccctttgccatcgccaaggagGACTACAAA | |
| | | GACGATGACGACAAGTAA | |
| 316 | branchpoint | ggaacagaaaatataaagtttctgaggagaattcaaatgaagccaaaacctcaaaa | 289 |
| | STAT3 Var1 | aagatacatgcaggacctgcaggcagtatccccaagagaaggctccctgttggccag | |
| | | gtgcagtggctcacgcctgtaatgccagcactttgagaacgacTaActctcttctttttt | |
| | | ttctgcaggaCctCgaGcagaaaatgaaagtggtagagaatctccaggatgactttg | |
| | | atttcaactataaaaccctcaagagtcaaggaGACTACAAAGACGATGACG | |
| | | ACAAGTAA | |
| 317 | branchpoint | ggaacagaaaatataaagtttctgaggagaattcaaatgaagccaaaacctcaaaa | 289 |
| | STAT3 Var2 | aagatacatgcaggacctgcaggcagtatccccaagagaaggctccctgttggccag | |
| | | gtgcagtggctcacgcctgtaatgccagcactttgagaacgatTaActctcttctttttt | |
| | | ttctgcaggaCctCgaGcagaaaatgaaagtggtagagaatctccaggatgactttg | |
| | | atttcaactataaaaccctcaagagtcaaggaGACTACAAAGACGATGACG | |
| | | ACAAGTAA | |
| 318 | branchpoint | ggaacagaaaatataaagtttctgaggagaattcaaatgaagccaaaacctcaaaa | 289 |
| | STAT3 Var3 | aagatacatgcaggacctgcaggcagtatccccaagagaaggctccctgttggccag | |
| | | gtgcagtggctcacgcctgtaatgccagcactttgagaacgatTaAttctcttctttttt | |
| | | ttctgcaggaCctCgaGcagaaaatgaaagtggtagagaatctccaggatgactttg | |
| | | atttcaactataaaaccctcaagagtcaaggaGACTACAAAGACGATGACG | |
| | | ACAAGTAA | |
| 319 | branchpoint | ggaacagaaaatataaagtttctgaggagaattcaaatgaagccaaaacctcaaaa | 289 |
| | STAT3 Var4 | aagatacatgcaggacctgcaggcagtatccccaagagaaggctccctgttggccag | |
| | | gtgcagtggctcacgcctgtaatgccagcactttgagaacgacTaAttctcttctttttt | |
| | | ttctgcaggaCctCgaGcagaaaatgaaagtggtagagaatctccaggatgactttg | |
| | | atttcaactataaaaccctcaagagtcaaggaGACTACAAAGACGATGACG | |
| | | ACAAGTAA | |
| 320 | branchpoint | ggaacagaaaatataaagtttctgaggagaattcaaatgaagccaaaacctcaaaa | 289 |
| | STAT3 Var5 | aagatacatgcaggacctgcaggcagtatccccaagagaaggctccctgttggccag | |
| | | gtgcagtggctcacgcctgtaatgccagcactttgagaacgacTgActctcttctttttt | |
| | | ttctgcaggaCctCgaGcagaaaatgaaagtggtagagaatctccaggatgactttg | |
| | | atttcaactataaaaccctcaagagtcaaggaGACTACAAAGACGATGACG | |
| | | ACAAGTAA | |
| 321 | branchpoint | ggaacagaaaatataaagtttctgaggagaattcaaatgaagccaaaacctcaaaa | 289 |
| | STAT3 Var6 | aagatacatgcaggacctgcaggcagtatccccaagagaaggctccctgttggccag | |
| | | gtgcagtggctcacgcctgtaatgccagcactttgagaacgatTgActctcttctttttt | |
| | | ttctgcaggaCctCgaGcagaaaatgaaagtggtagagaatctccaggatgactttg | |
| | | atttcaactataaaaccctcaagagtcaaggaGACTACAAAGACGATGACG | |
| | | ACAAGTAA | |
| 322 | branchpoint | ggaacagaaaatataaagtttctgaggagaattcaaatgaagccaaaacctcaaaa | 289 |
| | STAT3 Var7 | aagatacatgcaggacctgcaggcagtatccccaagagaaggctccctgttggccag | |
| | | gtgcagtggctcacgcctgtaatgccagcactttgagaacgatTgAttctcttctttttt | |
| | | ttctgcaggaCctCgaGcagaaaatgaaagtggtagagaatctccaggatgactttg | |
| | | atttcaactataaaaccctcaagagtcaaggaGACTACAAAGACGATGACG | |
| | | ACAAGTAA | |
| 323 | branchpoint | ggaacagaaaatataaagtttctgaggagaattcaaatgaagccaaaacctcaaaa | 289 |
| | STAT3 Var8 | aagatacatgcaggacctgcaggcagtatccccaagagaaggctccctgttggccag | |
| | | gtgcagtggctcacgcctgtaatgccagcactttgagaacgacTgAttctcttctttttt | |
| | | ttctgcaggaCctCgaGcagaaaatgaaagtggtagagaatctccaggatgactttg | |
| | | atttcaactataaaaccctcaagagtcaaggaGACTACAAAGACGATGACG | |
| | | ACAAGTAA | |
| 324 | branchpoint | ggaacagaaaatataaagtttctgaggagaattcaaatgaagccaaaacctcaaaa | 289 |
| | STAT3 Var9 | aagatacatgcaggacctgcaggcagtatccccaagagaaggctccctgttggccag | |
| | | gtgcagtggctcacgcctgtaatgccagcactttgagaacgacTcActctcttctttttt | |
| | | ttctgcaggaCctCgaGcagaaaatgaaagtggtagagaatctccaggatgactttg | |
| | | atttcaactataaaaccctcaagagtcaaggaGACTACAAAGACGATGACG | |
| | | ACAAGTAA | |
| 325 | branchpoint | ggaacagaaaatataaagtttctgaggagaattcaaatgaagccaaaacctcaaaa | 289 |
| | STAT3 | aagatacatgcaggacctgcaggcagtatccccaagagaaggctccctgttggccag | |
| | Var10 | gtgcagtggctcacgcctgtaatgccagcactttgagaacgatTcActctcttctttttt | |
| | | ttctgcaggaCctCgaGcagaaaatgaaagtggtagagaatctccaggatgactttg | |
| | | atttcaactataaaaccctcaagagtcaaggaGACTACAAAGACGATGACG | |
| | | ACAAGTAA | |
| 326 | branchpoint | ggaacagaaaatataaagtttctgaggagaattcaaatgaagccaaaacctcaaaa | 289 |
| | STAT3 | aagatacatgcaggacctgcaggcagtatccccaagagaaggctccctgttggccag | |
| | Var11 | gtgcagtggctcacgcctgtaatgccagcactttgagaacgatTcAttctcttctttttt | |
| | | ttctgcaggaCctCgaGcagaaaatgaaagtggtagagaatctccaggatgactttg | |
| | | atttcaactataaaaccctcaagagtcaaggaGACTACAAAGACGATGACG | |
| | | ACAAGTAA | |
| 327 | branchpoint | ggaacagaaaatataaagtttctgaggagaattcaaatgaagccaaaacctcaaaa | 289 |
| | STAT3 | aagatacatgcaggacctgcaggcagtatccccaagagaaggctccctgttggccag | |
| | Var13 | gtgcagtggctcacgcctgtaatgccagcactttgagaacgacTtActctcttctttttt | |
| | | ttctgcaggaCctCgaGcagaaaatgaaagtggtagagaatctccaggatgactttg | |
| | | atttcaactataaaaccctcaagagtcaaggaGACTACAAAGACGATGACG | |
| | | ACAAGTAA | |
| 328 | branchpoint | ggaacagaaaatataaagtttctgaggagaattcaaatgaagccaaaacctcaaaa | 289 |
| | STAT3 | aagatacatgcaggacctgcaggcagtatccccaagagaaggctccctgttggccag | |
| | Var14 | gtgcagtggctcacgcctgtaatgccagcactttgagaacgatTtActctcttctttttt | |
| | | ttctgcaggaCctCgaGcagaaaatgaaagtggtagagaatctccaggatgactttg | |
| | | atttcaactataaaaccctcaagagtcaaggaGACTACAAAGACGATGACG | |
| | | ACAAGTAA | |
| 329 | branchpoint | ggaacagaaaatataaagtttctgaggagaattcaaatgaagccaaaacctcaaaa | 289 |
| | STAT3 | aagatacatgcaggacctgcaggcagtatccccaagagaaggctccctgttggccag | |
| | Var15 | gtgcagtggctcacgcctgtaatgccagcactttgagaacgatTtAttctcttcttttttt | |
| | | tctgcaggaCctCgaGcagaaaatgaaagtggtagagaatctccaggatgactttg | |
| | | atttcaactataaaaccctcaagagtcaaggaGACTACAAAGACGATGACG | |
| | | ACAAGTAA | |
| 330 | branchpoint | ggaacagaaaatataaagtttctgaggagaattcaaatgaagccaaaacctcaaaa | 289 |
| | STAT3 | aagatacatgcaggacctgcaggcagtatccccaagagaaggctccctgttggccag | |
| | Var16 | gtgcagtggctcacgcctgtaatgccagcactttgagaacgacTtAttctcttctttttt | |
| | | ttctgcaggaCctCgaGcagaaaatgaaagtggtagagaatctccaggatgactttg | |
| | | atttcaactataaaaccctcaagagtcaaggaGACTACAAAGACGATGACG | |
| | | ACAAGTAA | |
| 331 | branchpoint | atgtggcttctcagggacattgcgttcagctgcactctgtatacctcaggggtgggacc | 328 |
| | PPIB Var1 | agcacgtcactgagtgaaggaggggagggaggctctggcagttgtgcagccttcctg | |
| | | gctgggctctgagggggctggaagaatttagaacaacgacTaActctcttctttttttt | |
| | | ctgcaggaAgtTgtTcggaaggtggagagcaccaagacagacagccgggataaac | |
| | | ccctgaaggatgtgatcatcgcagactgcggcaagatcgaggtggagaagccctttg | |
| | | ccatcgccaaggagGACTACAAAGACGATGACGACAAGTAA | |
| 332 | branchpoint | atgtggcttctcagggacattgcgttcagctgcactctgtatacctcaggggtgggacc | 328 |
| | PPIB Var2 | agcacgtcactgagtgaaggaggggagggaggctctggcagttgtgcagccttcctg | |
| | | gctgggctctgagggggctggaagaatttagaacaacgatTaActctcttctttttttt | |
| | | ctgcaggaAgtTgtTcggaaggtggagagcaccaagacagacagccgggataaac | |
| | | ccctgaaggatgtgatcatcgcagactgcggcaagatcgaggtggagaagccctttg | |
| | | ccatcgccaaggagGACTACAAAGACGATGACGACAAGTAA | |
| 333 | branchpoint | atgtggcttctcagggacattgcgttcagctgcactctgtatacctcagggggggacc | 328 |
| | PPIB Var3 | agcacgtcactgagtgaaggaggggagggaggctctggcagttgtgcagccttcctg | |
| | | gctgggctctgagggggctggaagaatttagaacaacgatTaAttctcttcttttttttc | |
| | | tgcaggaAgtTgtTcggaaggtggagagcaccaagacagacagccgggataaacc | |
| | | cctgaaggatgtgatcatcgcagactgcggcaagatcgaggtggagaagccctttgc | |
| | | catcgccaaggagGACTACAAAGACGATGACGACAAGTAA | |
| 334 | branchpoint | atgtggcttctcagggacattgcgttcagctgcactctgtatacctcaggggtgggacc | 328 |
| | PPIB Var4 | agcacgtcactgagtgaaggaggggagggaggctctggcagttgtgcagccttcctg | |
| | | gctgggctctgagggggctggaagaatttagaacaacgacTaAttctcttctttttttt | |
| | | ctgcaggaAgtTgtTcggaaggtggagagcaccaagacagacagccgggataaac | |
| | | ccctgaaggatgtgatcatcgcagactgcggcaagatcgaggtggagaagccctttg | |
| | | ccatcgccaaggagGACTACAAAGACGATGACGACAAGTAA | |
| 335 | branchpoint | atgtggcttctcagggacattgcgttcagctgcactctgtatacctcaggggtgggacc | 328 |
| | PPIB Var5 | agcacgtcactgagtgaaggaggggagggaggctctggcagttgtgcagccttcctg | |
| | | gctgggctctgagggggctggaagaatttagaacaacgacTgActctcttctttttttt | |
| | | ctgcaggaAgtTgtTcggaaggtggagagcaccaagacagacagccgggataaac | |
| | | ccctgaaggatgtgatcatcgcagactgcggcaagatcgaggtggagaagccctttg | |
| | | ccatcgccaaggagGACTACAAAGACGATGACGACAAGTAA | |
| 336 | branchpoint | atgtggcttctcagggacattgcgttcagctgcactctgtatacctcaggggtgggacc | 328 |
| | PPIB Var6 | agcacgtcactgagtgaaggaggggagggaggctctggcagttgtgcagccttcctg | |
| | | gctgggctctgagggggctggaagaatttagaacaacgatTgActctcttctttttttt | |
| | | ctgcaggaAgtTgtTcggaaggtggagagcaccaagacagacagccgggataaac | |
| | | ccctgaaggatgtgatcatcgcagactgcggcaagatcgaggtggagaagccctttg | |
| | | ccatcgccaaggagGACTACAAAGACGATGACGACAAGTAA | |
| 337 | branchpoint | atgtggcttctcagggacattgcgttcagctgcactctgtatacctcaggggtgggacc | 328 |
| | PPIB Var7 | agcacgtcactgagtgaaggaggggagggaggctctggcagttgtgcagccttcctg | |
| | | gctgggctctgagggggctggaagaatttagaacaacgatTgAttctcttcttttttttc | |
| | | tgcaggaAgtTgtTcggaaggtggagagcaccaagacagacagccgggataaacc | |
| | | cctgaaggatgtgatcatcgcagactgcggcaagatcgaggtggagaagccctttgc | |
| | | catcgccaaggagGACTACAAAGACGATGACGACAAGTAA | |
| 338 | branchpoint | atgtggcttctcagggacattgcgttcagctgcactctgtatacctcaggggtgggacc | 328 |
| | PPIB Var8 | agcacgtcactgagtgaaggaggggagggaggctctggcagttgtgcagccttcctg | |
| | | gctgggctctgagggggctggaagaatttagaacaacgacTgAttctcttctttttttt | |
| | | ctgcaggaAgtTgtTcggaaggtggagagcaccaagacagacagccgggataaac | |
| | | ccctgaaggatgtgatcatcgcagactgcggcaagatcgaggtggagaagccctttg | |
| | | ccatcgccaaggagGACTACAAAGACGATGACGACAAGTAA | |
| 339 | branchpoint | atgtggcttctcagggacattgcgttcagctgcactctgtatacctcaggggtgggacc | 328 |
| | PPIB Var9 | agcacgtcactgagtgaaggaggggagggaggctctggcagttgtgcagccttcctg | |
| | | gctgggctctgagggggctggaagaatttagaacaacgacTcActctcttctttttttt | |
| | | ctgcaggaAgtTgtTcggaaggtggagagcaccaagacagacagccgggataaac | |
| | | ccctgaaggatgtgatcatcgcagactgcggcaagatcgaggtggagaagccctttg | |
| | | ccatcgccaaggagGACTACAAAGACGATGACGACAAGTAA | |
| 340 | branchpoint | atgtggcttctcagggacattgcgttcagctgcactctgtatacctcaggggtgggacc | 328 |
| | PPIB Var10 | agcacgtcactgagtgaaggaggggagggaggctctggcagttgtgcagccttcctg | |
| | | gctgggctctgagggggctggaagaatttagaacaacgatTcActctcttcttttttttc | |
| | | tgcaggaAgtTgtTcggaaggtggagagcaccaagacagacagccgggataaacc | |
| | | cctgaaggatgtgatcatcgcagactgcggcaagatcgaggtggagaagccctttgc | |
| | | catcgccaaggagGACTACAAAGACGATGACGACAAGTAA | |
| 341 | branchpoint | atgtggcttctcagggacattgcgttcagctgcactctgtatacctcaggggtgggacc | 328 |
| | PPIB Var11 | agcacgtcactgagtgaaggaggggagggaggctctggcagttgtgcagccttcctg | |
| | | gctgggctctgagggggctggaagaatttagaacaacgatTcAttctcttcttttttttc | |
| | | tgcaggaAgtTgtTcggaaggtggagagcaccaagacagacagccgggataaacc | |
| | | cctgaaggatgtgatcatcgcagactgcggcaagatcgaggtggagaagccctttgc | |
| | | catcgccaaggagGACTACAAAGACGATGACGACAAGTAA | |
| 342 | branchpoint | atgtggcttctcagggacattgcgttcagctgcactctgtatacctcagggggggacc | 328 |
| | PPIB Var13 | agcacgtcactgagtgaaggaggggagggaggctctggcagttgtgcagccttcctg | |
| | | gctgggctctgagggggctggaagaatttagaacaacgacTtActctcttcttttttttc | |
| | | tgcaggaAgtTgtTcggaaggtggagagcaccaagacagacagccgggataaacc | |
| | | cctgaaggatgtgatcatcgcagactgcggcaagatcgaggtggagaagccctttgc | |
| | | catcgccaaggagGACTACAAAGACGATGACGACAAGTAA | |
| 343 | branchpoint | atgtggcttctcagggacattgcgttcagctgcactctgtatacctcaggggtgggacc | 328 |
| | PPIB Var14 | agcacgtcactgagtgaaggaggggagggaggctctggcagttgtgcagccttcctg | |
| | | gctgggctctgagggggctggaagaatttagaacaacgatTtActctcttcttttttttc | |
| | | tgcaggaAgtTgtTcggaaggtggagagcaccaagacagacagccgggataaacc | |
| | | cctgaaggatgtgatcatcgcagactgcggcaagatcgaggtggagaagccctttgc | |
| | | catcgccaaggagGACTACAAAGACGATGACGACAAGTAA | |
| 344 | branchpoint | atgtggcttctcagggacattgcgttcagctgcactctgtatacctcaggggtgggacc | 328 |
| | PPIB Var15 | agcacgtcactgagtgaaggaggggagggaggctctggcagttgtgcagccttcctg | |
| | | gctgggctctgagggggctggaagaatttagaacaacgatTtAttctcttcttttttttc | |
| | | tgcaggaAgtTgtTcggaaggtggagagcaccaagacagacagccgggataaacc | |
| | | cctgaaggatgtgatcatcgcagactgcggcaagatcgaggtggagaagccctttgc | |
| | | catcgccaaggagGACTACAAAGACGATGACGACAAGTAA | |
| 345 | branchpoint | atgtggcttctcagggacattgcgttcagctgcactctgtatacctcaggggtgggacc | 328 |
| | PPIB Var16 | agcacgtcactgagtgaaggaggggagggaggctctggcagttgtgcagccttcctg | |
| | | gctgggctctgagggggctggaagaatttagaacaacgacTtAttctcttcttttttttc | |
| | | tgcaggaAgtTgtTcggaaggtggagagcaccaagacagacagccgggataaacc | |
| | | cctgaaggatgtgatcatcgcagactgcggcaagatcgaggtggagaagccctttgc | |
| | | catcgccaaggagGACTACAAAGACGATGACGACAAGTAA | |
| 346 | USF1_5TS_ | agCaaGggAgggattctatccaaagcttgtgattatatccaggagcttcggcagagt | 330 |
| | 150bp | aaccaccgcttgtctgaagaactgcagggacttgaccaactgcagctggacaatgac | |
| | | gtgctCcgTcaGcagGTAAGTttgggcTGCATGacTGCATGgtTGCATGa | |
| | | acacaTATTAATttccGTAGTAAAGCTGGCACTTCCAAGCCCCTGAA | |
| | | TGTATTCAGACATCCACTGGTGAGGGGGAAAAGATGAAGCCTTC | |
| | | TCCATGGAGAACAAAGTAGAGGGTGTCAAACTGGGTCAGTGGCT | |
| | | AGCAGAACTGAGAAGGGCTGCACTGGGGGTA | |
| 347 | USF1_5TS_ | agCaaGggAgggattctatccaaagcttgtgattatatccaggagcttcggcagagt | 260 |
| | 80bp_left | aaccaccgcttgtctgaagaactgcagggacttgaccaactgcagctggacaatgac | |
| | | gtgctCcgTcaGcagGTAAGTttgggcTGCATGacTGCATGgtTGCATGa | |
| | | acacaTATTAATttccCCTTCTCCATGGAGAACAAAGTAGAGGGTGT | |
| | | CAAACTGGGTCAGTGGCTAGCAGAACTGAGAAGGGCTGCACTG | |
| | | GGGGTA | |
| 348 | USF1_5TS_ | agCaaGggAgggattctatccaaagcttgtgattatatccaggagcttcggcagagt | 260 |
| | 80bp_midle | aaccaccgcttgtctgaagaactgcagggacttgaccaactgcagctggacaatgac | |
| | | gtgctCcgTcaGcagGTAAGTttgggcTGCATGacTGCATGgtTGCATGa | |
| | | acacaTATTAATttccATGTATTCAGACATCCACTGGTGAGGGGGAA | |
| | | AAGATGAAGCCTTCTCCATGGAGAACAAAGTAGAGGGTGTCAAA | |
| | | CTGGG | |
| 349 | USF1_5TS_ | agCaaGggAgggattctatccaaagcttgtgattatatccaggagcttcggcagagt | 260 |
| | 80bp_right | aaccaccgcttgtctgaagaactgcagggacttgaccaactgcagctggacaatgac | |
| | | gtgctCcgTcaGcagGTAAGTttgggcTGCATGacTGCATGgtTGCATGa | |
| | | acacaTATTAATttccAAGGGAATGGGTAGTAAAGCTGGCACTTCCA | |
| | | AGCCCCTGAATGTATTCAGACATCCACTGGTGAGGGGGAAAAGA | |
| | | TGAAG | |
| 350 | USF1_5TS_ | agCaaGggAgggattctatccaaagcttgtgattatatccaggagcttcggcagagt | 330 |
| | 150bp_NT | aaccaccgcttgtctgaagaactgcagggacttgaccaactgcagctggacaatgac | |
| | | gtgctCcgTcaGcagGTAAGTttgggcTGCATGacTGCATGgtTGCATGa | |
| | | acacaTATTAATttccTTGACCAAGTGGAGGGTGCTCTTCCAGCTCT | |
| | | TGAACAGGACCTAGAGAGTTGGATGTATTAGATGGGCGTACGCA | |
| | | gTATGTGCCCAGTTGTATGATTGTGCGTTTTCAAGGAAGGGAGTG | |
| | | TGCGTCGATTCGTTCAGTATCGACAgGGGG | |
| 351 | HTT_opt_ | GCCACCATGGACTACAAAGACGATGACGACAAGggcccggctgtggc | 225 |
| | hyb2_noGURAGU_ | tgaggagccCctCcaccgaccGTTGAAttgggcTGCATGacTGCATGgtTG | |
| | ISE_BP_ | CATGaacacaTATTAATttcctccacttagttctacacctcattcattcattcagtg | |
| | cargo10 | agtgtttctcgactactatgaataaaccgttatactccatgttgcgggcagaatgggga | |
| | | tctggacaggg | |
| 352 | HTT_opt_ | GCCACCATGGACTACAAAGACGATGACGACAAGggcccggctgtggc | 203 |
| | hyb2_noGURAGU_ | tgaggagccCctCcaccgaccGTGAGTttgggcaacacaTATTAATttcctcca | |
| | noISE_ | cttagttctacacctcattcattcattcagtgagtgtttctcgactactatgaataaaccg | |
| | BP_cargo11 | ttatactccatgttgcgggcagaatggggatctggacaggg | |
| 353 | HTT_opt_ | GCCACCATGGACTACAAAGACGATGACGACAAGggcccggctgtggc | 214 |
| | hyb2_noGURAGU_ | tgaggagccCctCcaccgaccGTTGAAttgggcTGCATGacTGCATGgtTG | |
| | ISE_noBP_ | CATGaacacatccacttagttctacacctcattcattcattcagtgagtgtttctcgac | |
| | cargo12 | tactatgaataaaccgttatactccatgttgcgggcagaatggggatctggacaggg | |
| 354 | HTT_opt_ | GCCACCATGGACTACAAAGACGATGACGACAAGggcccggctgtggc | 225 |
| | hyb2_natGURAGU_ | tgaggagccCctCcaccgaccGTGAGTttgggcTGCATGacTGCATGgtTG | |
| | ISE_BP_ | CATGaacacaTATTAATttcctccacttagttctacacctcattcattcattcagtg | |
| | cargo13 | agtgtttctcgactactatgaataaaccgttatactccatgttgcgggcagaatgggga | |
| | | tctggacaggg | |
| 355 | HTT_opt_ | GCCACCATGGACTACAAAGACGATGACGACAAGggcccggctgtggc | 203 |
| | hyb2_GUAAGU_ | tgaggagccCctCcaccgaccGTAAGTttgggcaacacaTATTAATttcctcca | |
| | noISE_BP_ | cttagttctacacctcattcattcattcagtgagtgtttctcgactactatgaataaaccg | |
| | cargo14 | ttatactccatgttgcgggcagaatggggatctggacaggg | |
| 356 | HTT_opt_ | GCCACCATGGACTACAAAGACGATGACGACAAGggcccggctgtggc | 192 |
| | hyb2_GUAAGU_ | tgaggagccCctCcaccgaccGTAAGTttgggcaacacatccacttagttctacac | |
| | noISE_noBP_ | ctcattcattcattcagtgagtgtttctcgactactatgaataaaccgttatactccatgt | |
| | cargo15 | tgcgggcagaatggggatctggacaggg | |
| 357 | HTT_opt_ | GCCACCATGGACTACAAAGACGATGACGACAAGggcccggctgtggc | 280 |
| | hyb2_ | tgaggagccCctCcaccgaccGTAAGTttgggcTGCATGacTGCATGgtTG | |
| | 100bpdown_ | CATGaacacaTATTAATttcctccacttagttctacacctcattcattcattcagtg | |
| | GUAAGU_ISE_BP_ | agtgtttctcgactactatgaataaaccgttatactccatgttgcgggcagaatgggga | |
| | cargo16 | tctggctggcggccgctcgagcatgcatctagagggccctattctatagtgtcacctaa | |
| | | atgctag | |
| 358 | HTT_opt_hyb2_ | GCCACCATGGACTACAAAGACGATGACGACAAGggcccggctgtggc | 175 |
| | 100bpup_GUAAGU_ | tgaggagccCctCcaccgaccGTAAGTttgggcTGCATGacTGCATGgtTG | |
| | ISE_BP_ | CATGaacacaTATTAATttccactatgaataaaccgttatactccatgttgcgggc | |
| | cargo17 | agaatggggatctggacaggg | |
| 359 | HTT_opt_hyb2_ | GCCACCATGGACTACAAAGACGATGACGACAAGggcccggctgtggc | 395 |
| | U1snRNA_ | tgaggagccCctCcaccgaccGTAAGTttgggcatacttacctggcaggggagat | |
| | FL_ISE_BP_ | accatgatcacgaaggtggttttcccagggcgaggcttatccattgcactccggatgtg | |
| | cargo18 | ctgacccctgcgatttccccaaatgtgggaaactcgactgcataatttgtggtagtggg | |
| | | ggactgcgttcgcgctttcccctgggtttcTGCATGacTGCATGgtTGCATGaa | |
| | | cacaTATTAATttcctccacttagttctacacctcattcattcattcagtgagtgtttct | |
| | | cgactactatgaataaaccgttatactccatgttgcgggcagaatggggatctggaca | |
| | | ggg | |
| 360 | HTT_opt_hyb2_ | GCCACCATGGACTACAAAGACGATGACGACAAGggcccggctgtggc | 260 |
| | U1snRNA_ | tgaggagccCctCcaccgaccGTAAGTttgggctgcgatttccccaaatgtgggaa | |
| | SL3_ISE_ | actcggggtttcTGCATGacTGCATGgtTGCATGaacacaTATTAATttcct | |
| | BP_cargo19 | ccacttagttctacacctcattcattcattcagtgagtgtttctcgactactatgaataaa | |
| | | ccgttatactccatgttgcgggcagaatggggatctggacaggg | |
| 361 | HTT_opt_hyb2_ | GCCACCATGGACTACAAAGACGATGACGACAAGggcccggctgtggc | 273 |
| | U1snRNA_ | tgaggagccCctCcaccgaccGTAAGTttgggcataatttgtggtagtgggggact | |
| | smSL4_ISE_ | gcgttcgcgctttcccctgggtttcTGCATGacTGCATGgtTGCATGaacacaT | |
| | BP_cargo20 | ATTAATttcctccacttagttctacacctcattcattcattcagtgagtgtttctcgact | |
| | | actatgaataaaccgttatactccatgttgcgggcagaatggggatctggacaggg | |
| 362 | HTT_opt_hyb2_ | GCCACCATGGACTACAAAGACGATGACGACAAGggcccggctgtggc | 260 |
| | ISE_U1snRNA_ | tgaggagccCctCcaccgaccGTAAGTttgggcTGCATGacTGCATGgtTG | |
| | SL3_BP_ | CATGtgcgatttccccaaatgtgggaaactcggggtttcaacacaTATTAATttcc | |
| | cargo21 | tccacttagttctacacctcattcattcattcagtgagtgtttctcgactactatgaataa | |
| | | accgttatactccatgttgcgggcagaatggggatctggacaggg | |
| 363 | HTT_opt_hyb2_ | GCCACCATGGACTACAAAGACGATGACGACAAGggcccggctgtggc | 225 |
| | GUAAGU_ | tgaggagccCctCcaccgaccGTAAGTttgggcTTTGGGacTTTGGGgtTTT | |
| | altISE_BP_ | GGGaacacaTATTAATttcctccacttagttctacacctcattcattcattcagtga | |
| | cargo22 | gtgtttctcgactactatgaataaaccgttatactccatgttgcgggcagaatggggat | |
| | | ctggacaggg | |
| 364 | HTT_opt_hyb2_ | GCCACCATGGACTACAAAGACGATGACGACAAGggcccggctgtggc | 225 |
| | GUAAGU_ | tgaggagccCctCcaccgaccGTAAGTttgggcTTTGGGacGAGGGGgtT | |
| | mixISE_BP_ | GCATGaacacaTATTAATttcctccacttagttctacacctcattcattcattcagt | |
| | cargo23 | gagtgtttctcgactactatgaataaaccgttatactccatgttgcgggcagaatgggg | |
| | | atctggacaggg | |
| 365 | HTT_opt_hyb2_ | GCCACCATGGACTACAAAGACGATGACGACAAGggcccggctgtggc | 246 |
| | GUAAGU_ | tgaggagccCctCcaccgaccGTAAGTttgggcTTTGGGcTTTGGGacGAG | |
| | mixdoubleISE_ | GGGcGAGGGGgtTGCATGcTGCATGaacacaTATTAATttcctccactta | |
| | BP_cargo24 | gttctacacctcattcattcattcagtgagtgtttctcgactactatgaataaaccgttat | |
| | | actccatgttgcgggcagaatggggatctggacaggg | |
| 366 | HTT_opt_hyb2_ | GCAAGGCGGAGGAAGGCCACCATGGACTACAAAGACGATGACG | 240 |
| | ESE_Ax1_ | ACAAGggcccggctgtggctgaggagccCctCcaccgaccGTAAGTttgggcT | |
| | GUAAGU_ISE_ | GCATGacTGCATGgtTGCATGaacacaTATTAATttcctccacttagttcta | |
| | BP_cargo25 | cacctcattcattcattcagtgagtgtttctcgactactatgaataaaccgttatactcc | |
| | | atgttgcgggcagaatggggatctggacaggg | |
| 367 | HTT_opt_hyb2_ | GCAAGGCGGAGGAAAGGCAAGGCGGAGGAAGGCAAGGCGGAG | 271 |
| | ESE_Ax3_ | GAAGGCCACCATGGACTACAAAGACGATGACGACAAGggcccggct | |
| | GUAAGU_ISE_ | gtggctgaggagccCctCcaccgaccGTAAGTttgggcTGCATGacTGCATG | |
| | BP_cargo26 | gtTGCATGaacacaTATTAATttcctccacttagttctacacctcattcattcattc | |
| | | agtgagtgtttctcgactactatgaataaaccgttatactccatgttgcgggcagaatg | |
| | | gggatctggacaggg | |
| 368 | HTT_opt_hyb2_ | GCACACAGGACCACACAGGACGCACACAGGACCACACAGGACG | 267 |
| | ESE_Bx4_ | CCACCATGGACTACAAAGACGATGACGACAAGggcccggctgtggctg | |
| | GUAAGU_ISE_ | aggagccCctCcaccgaccGTAAGTttgggcTGCATGacTGCATGgtTGCA | |
| | BP_cargo27 | TGaacacaTATTAATttcctccacttagttctacacctcattcattcattcagtgagt | |
| | | gtttctcgactactatgaataaaccgttatactccatgttgcgggcagaatggggatct | |
| | | ggacaggg | |
| 369 | HTT_opt_hyb2_ | GAAAAAGAAAGAAAAAAAGAAAGAAGCCACCATGGACTACAAA | 250 |
| | ESE_Cx2_ | GACGATGACGACAAGggcccggctgtggctgaggagccCctCcaccgaccG | |
| | GUAAGU_ISE_ | TAAGTttgggcTGCATGacTGCATGgtTGCATGaacacaTATTAATttcc | |
| | BP_cargo28 | tccacttagttctacacctcattcattcattcagtgagtgtttctcgactactatgaataa | |
| | | accgttatactccatgttgcgggcagaatggggatctggacaggg | |
| 370 | HTT_opt_hyb2_ | GTCAGAGGATCAGAGGAGTCAGAGGATCAGAGGAGCCACCATG | 259 |
| | ESE_Dx4_ | GACTACAAAGACGATGACGACAAGggcccggctgtggctgaggagccCct | |
| | GUAAGU_ISE_ | CcaccgaccGTAAGTttgggcTGCATGacTGCATGgtTGCATGaacacaT | |
| | BP_cargo29 | ATTAATttcctccacttagttctacacctcattcattcattcagtgagtgtttctcgact | |
| | | actatgaataaaccgttatactccatgttgcgggcagaatggggatctggacaggg | |
| 371 | pDF0945_ | gcccggctgtggctgaggagccCctCcaccgaccGTAAGTttgggcTGCATGac | 235 |
| | HTT_cargo3 | TGCATGgtTGCATGaacacaTATTAATttcctccacttagttctacacctcattc | |
| | | attcattcagtgagtgtttctcgactactatgaataaaccgttatactccatgttgcggg | |
| | | cagaatggggatctggacagggaagcacagggcacgagttcaccaatggctgtcaa | |
| | | gctacgctgc | |
| 372 | HTT cargo13 | tcacactttggacctcattttcatctaaggaaggtggtataatatctcccagggataca | 379 |
| | aRY1584 | ggaacctcagggagagataagactactgtcatgtgtgcccctctctctaccatttctgg | |
| | ABCD2 | aaacaataccaggaggcagaattcaggcatccaacgacTtActctcttcttttttttct | |
| | | gcagagCaaGggAgggattctatccaaagcttgtgattatatccaggagcttcggca | |
| | | gagtaaccaccgcttgtctgaagaactgcagggacttgaccaactgcagctggacaa | |
| | | tgacgtgcttcgacaacagGACTACAAGGACCACGACGGTGACTACAA | |
| | | GGACCACGACATCGACTACAAGGACGACGACGACAAGTAA | |
| 373 | USF1 NT | TTGACCAAGTGGAGGGTGCTCTTCCAGCTCTTGAACAGGACCTA | 379 |
| | cargo | GAGAGTTGGATGTATTAGATGGGCGTACGCAgTATGTGCCCAGT | |
| | 3xFLAG_ | TGTATGATTGTGCGTTTTCAAGGAAGGGAGTGTGCGTCGATTCGT | |
| | ary1852_E1 | TCAGTATCGACAgGGGGaacgacTtActctcttcttttttttctgcagagCaaG | |
| | | ggAgggattctatccaaagcttgtgattatatccaggagcttcggcagagtaaccacc | |
| | | gcttgtctgaagaactgcagggacttgaccaactgcagctggacaatgacgtgcttcg | |
| | | acaacagGACTACAAGGACCACGACGGTGACTACAAGGACCACGA | |
| | | CATCGACTACAAGGACGACGACGACAAGTAA | |
| 374 | USF1 T | agacccaagcttggtaccgagctcggatcctcacactttggacctcattttcatctaag | 409 |
| | cargo xten | gaaggtggtataatatctcccagggatacaggaacctcagggagagataagactact | |
| | 3xFLAG- | gtcatgtgtgcccctctctctaccatttctggaaacaataccaggaggcagaattcagg | |
| | ary1852_D1 | catccaacgacTtActctcttcttttttttctgcagagCaaGggAgggattctatccaa | |
| | | agcttgtgattatatccaggagcttcggcagagtaaccaccgcttgtctgaagaactgc | |
| | | agggacttgaccaactgcagctggacaatgacgtgcttcgacaacagGACTACAA | |
| | | GGACCACGACGGTGACTACAAGGACCACGACATCGACTACAAGG | |
| | | ACGACGACGACAAGTAA | |
| 375 | pDF0978_ | taaatcaaacgtccacataaagaatgaggtggtaaaatgaacaagcactacggttct | 248 |
| | RPL41 | atcgttctctgttctgttaaatcctggctccagggagaaaacactcaaacgtttttctcc | |
| | branchpoint | taaagatcttttaagatttccaaaccaaatgttaacgacTtActctcttcttttttttctg | |
| | v13 cargo 2 | caggctCaagcgcaaaagaagaaagatgaggcagaggtccaagGACTACAAA | |
| | | GACGATGACGACAAGTAA | |
| 376 | pDF0865_ | ggaacagaaaatataaagtttctgaggagaattcaaatgaagccaaaacctcaaaa | 289 |
| | STAT3_3TS_ | aagatacatgcaggacctgcaggcagtatccccaagagaaggctccctgttggccag | |
| | Cargo2 | gtgcagtggctcacgcctgtaatgccagcactttgagaacgaggaattctcttctttttt | |
| | | ttctgcaggaCctCgaGcagaaaatgaaagtggtagagaatctccaggatgactttg | |
| | | atttcaactataaaaccctcaagagtcaaggaGACTACAAAGACGATGACG | |
| | | ACAAGTAA | |
| 377 | pDF0867 | atgtggcttctcagggacattgcgttcagctgcactctgtatacctcaggggtgggacc | 328 |
| | PPIB cargo 3 | agcacgtcactgagtgaaggaggggagggaggctctggcagttgtgcagccttcctg | |
| | | gctgggctctgagggggctggaagaatttagaacaacgaggaattctcttcttttttttc | |
| | | tgcaggaAgtTgtTcggaaggtggagagcaccaagacagacagccgggataaacc | |
| | | cctgaaggatgtgatcatcgcagactgcggcaagatcgaggtggagaagccctttgc | |
| | | catcgccaaggagGACTACAAAGACGATGACGACAAGTAA | |
| 378 | SHANK3 | GAGGAGCCTAGAAGGCGCCGGGTTGGCAAGTGGGCAGGGAAC | 289 |
| | Cargo 3 | AGAGACATGCTTTGTCGTGTTCTCAGCGGAGCTGGGGTACCTTG | |
| | | GTGGTCTCAGGCGTGAGACAGGGACTGCCTGAAGGCAGAGGCA | |
| | | CCAAAAGCTACAAGAGCAAACaacgacTtActctcttcttttttttctgcagtc | |
| | | CCtgttCgaacgccagggcctcccaggcccagagaagctgccgggctccttgcggaa | |
| | | ggggattccacggaccaagtctGACTACAAAGACGATGACGACAAGTAA | |
| 379 | pDF0986 | GCCACCATGGACTACAAAGACGATGACGACAAGggcccggctgtggc | 269 |
| | HTT cargo | tgaggagccCctCcaccgaccGTGAGTttgggcTGCATGacTGCATGgtTG | |
| | | CATGaacacaTATTAATttcctccacttagttctacacctcattcattcattcagtg | |
| | | agtgtttctcgactactatgaataaaccgttatactccatgttgcgggcagaatgggga | |
| | | tctggacagggaagcacagggcacgagttcaccaatggctgtcaagctacgctgc | |
| 384 | PABPC1_5TS_ | GCCACCATGGACTACAAAGACGATGACGACAAGaaccccagtgcccc | 424 |
| | cargo_1 | cagctaccccatggcctcgctctacgtgggggacctccaccccgacgtgaccgaggcg | |
| | | atgctctacgagaagttcagcccggccgggcccatcctctccatccgggtctgcaggg | |
| | | acatgatcacccgccgctccttgggctacgcgtatgtgaacttccagcagccAgcTga | |
| | | TgGTGAGTttgggcTGCATGacTGCATGgtTGCATGaacacaTATTAAT | |
| | | ttccCAATATTACTTCAAAATTTTTGCTGGCTACTTAAGATTATATA | |
| | | AACTATGGTGACTGGAGTGGGAGGACACATGGTCTCACAGTTGA | |
| | | ACGCTTCCTCTTTAAGCTTCAAGATGGCTAGACCTTTCAAGTATCA | |
| | | CACACTAGTGTGGGACC | |
| 385 | PABPC1_5TS_ | GCCACCATGGACTACAAAGACGATGACGACAAGaaccccagtgcccc | 424 |
| | cargo_2 | cagctaccccatggcctcgctctacgtgggggacctccaccccgacgtgaccgaggcg | |
| | | atgctctacgagaagttcagcccggccgggcccatcctctccatccgggtctgcaggg | |
| | | acatgatcacccgccgctccttgggctacgcgtatgtgaacttccagcagccAgcTga | |
| | | TgGTGAGTttgggcTGCATGacTGCATGgtTGCATGaacacaTATTAAT | |
| | | ttccGCTACTTAAGATTATATAAACTATGGTGACTGGAGTGGGAG | |
| | | GACACATGGTCTCACAGTTGAACGCTTCCTCTTTAAGCTTCAAGA | |
| | | TGGCTAGACCTTTCAAGTATCACACACTAGTGTGGGACCTAAGTT | |
| | | GTATAAAGCAAAGACAAAT | |
| 386 | PABPC1_5TS_ | GCCACCATGGACTACAAAGACGATGACGACAAGaaccccagtgcccc | 424 |
| | cargo_3 | cagctaccccatggcctcgctctacgtgggggacctccaccccgacgtgaccgaggcg | |
| | | atgctctacgagaagttcagcccggccgggcccatcctctccatccgggtctgcaggg | |
| | | acatgatcacccgccgctccttgggctacgcgtatgtgaacttccagcagccAgcTga | |
| | | TgGTGAGTttgggcTGCATGacTGCATGgtTGCATGaacacaTATTAAT | |
| | | ttccGTGACTGGAGTGGGAGGACACATGGTCTCACAGTTGAACGC | |
| | | TTCCTCTTTAAGCTTCAAGATGGCTAGACCTTTCAAGTATCACACA | |
| | | CTAGTGTGGGACCTAAGTTGTATAAAGCAAAGACAAATACCAGA | |
| | | AGCCCCCGAAATTTCTCAC | |
| 387 | PABPC1_5TS_ | GCCACCATGGACTACAAAGACGATGACGACAAGaaccccagtgcccc | 424 |
| | cargo_4 | cagctaccccatggcctcgctctacgtgggggacctccaccccgacgtgaccgaggcg | |
| | | atgctctacgagaagttcagcccggccgggcccatcctctccatccgggtctgcaggg | |
| | | acatgatcacccgccgctccttgggctacgcgtatgtgaacttccagcagccAgcTga | |
| | | TgGTGAGTttgggcTGCATGacTGCATGgtTGCATGaacacaTATTAAT | |
| | | ttccTCTCACAGTTGAACGCTTCCTCTTTAAGCTTCAAGATGGCTAG | |
| | | ACCTTTCAAGTATCACACACTAGTGTGGGACCTAAGTTGTATAAA | |
| | | GCAAAGACAAATACCAGAAGCCCCCGAAATTTCTCACATATAAAA | |
| | | GAATTCCATATTGCTAA | |
| 388 | PPIB_5TS_ | GCCACCATGGACTACAAAGACGATGACGACAAGctgcgcctctccgaa | 366 |
| | cargo_1 | cgcaacatgaaggtgctccttgccgccgccctcatcgcggggtccgtcttcttcctgctg | |
| | | ctgccgggaccttctgcggccgatgagaagaagaaggggcccaaagtTacAgtGa | |
| | | agGTGAGTttgggcTGCATGacTGCATGgtTGCATGaacacaTATTAAT | |
| | | ttccCTTAGCTTCTTTAAAGGGGCGTTGCTAGGGGAGGGAAGGTA | |
| | | CAAGAAGCTAACCTGAGGATGGGAGAGAGAATAGAGCCATATTT | |
| | | TTAGAGAAGTGGTTCTGAATCTGATTTTGGTGACGGTAAAAATCC | |
| | | TATGAGAATCTAATGAAAGC | |
| 389 | PPIB_5TS_ | GCCACCATGGACTACAAAGACGATGACGACAAGctgcgcctctccgaa | 366 |
| | cargo_2 | cgcaacatgaaggtgctccttgccgccgccctcatcgcggggtccgtcttcttcctgctg | |
| | | ctgccgggaccttctgcggccgatgagaagaagaaggggcccaaagtTacAgtGa | |
| | | agGTGAGTttgggcTGCATGacTGCATGgtTGCATGaacacaTATTAAT | |
| | | ttccTAGGGGAGGGAAGGTACAAGAAGCTAACCTGAGGATGGGA | |
| | | GAGAGAATAGAGCCATATTTTTAGAGAAGTGGTTCTGAATCTGA | |
| | | TTTTGGTGACGGTAAAAATCCTATGAGAATCTAATGAAAGCTCCA | |
| | | GACCCTTTTCTTGGAAAACAT | |
| 390 | PPIB_5TS_ | GCCACCATGGACTACAAAGACGATGACGACAAGctgcgcctctccgaa | 366 |
| | cargo_3 | cgcaacatgaaggtgctccttgccgccgccctcatcgcggggtccgtcttcttcctgctg | |
| | | ctgccgggaccttctgcggccgatgagaagaagaaggggcccaaagtTacAgtGa | |
| | | agGTGAGTttgggcTGCATGacTGCATGgtTGCATGaacacaTATTAAT | |
| | | ttccAACCTGAGGATGGGAGAGAGAATAGAGCCATATTTTTAGAG | |
| | | AAGTGGTTCTGAATCTGATTTTGGTGACGGTAAAAATCCTATGAG | |
| | | AATCTAATGAAAGCTCCAGACCCTTTTCTTGGAAAACATGCTTATC | |
| | | TATACCCTCCTTGGACTA | |
| 391 | PPIB_5TS_ | GCCACCATGGACTACAAAGACGATGACGACAAGctgcgcctctccgaa | 366 |
| | cargo_4 | cgcaacatgaaggtgctccttgccgccgccctcatcgcggggtccgtcttcttcctgctg | |
| | | ctgccgggaccttctgcggccgatgagaagaagaaggggcccaaagtTacAgtGa | |
| | | agGTGAGTttgggcTGCATGacTGCATGgtTGCATGaacacaTATTAAT | |
| | | ttccAGCCATATTTTTAGAGAAGTGGTTCTGAATCTGATTTTGGTG | |
| | | ACGGTAAAAATCCTATGAGAATCTAATGAAAGCTCCAGACCCTTT | |
| | | TCTTGGAAAACATGCTTATCTATACCCTCCTTGGACTACAGGATA | |
| | | ACAATATTTGCTCTAAAC | |
| 392 | RPL41_5TS_ | GCCACCATGGACTACAAAGACGATGACGACAAGagagccaagtgga | 266 |
| | cargo_1 | ggaagaagcgaatgcgGCgGTGAGTttgggcTGCATGacTGCATGgtTGC | |
| | | ATGaacacaTATTAATttccCCAGAGTTGCCTTTCCCTCCCACATTAA | |
| | | ATCAAACGTCCACATAAAGAATGAGGTGGTAAAATGAACAAGCA | |
| | | CTACGGTTCTATCGTTCTCTGTTCTGTTAAATCCTGGCTCCAGGGA | |
| | | GAAAACACTCAAACGTTTTTCTCCTAAAGATC | |
| 393 | RPL41_5TS_ | GCCACCATGGACTACAAAGACGATGACGACAAGagagccaagtgga | 266 |
| | cargo_2 | ggaagaagcgaatgcgGCgGTGAGTttgggcTGCATGacTGCATGgtTGC | |
| | | ATGaacacaTATTAATttccTAAATCAAACGTCCACATAAAGAATGA | |
| | | GGTGGTAAAATGAACAAGCACTACGGTTCTATCGTTCTCTGTTCT | |
| | | GTTAAATCCTGGCTCCAGGGAGAAAACACTCAAACGTTTTTCTCC | |
| | | TAAAGATCTTTTAAGATTTCCAAACCAAATGTT | |
| 394 | RPL41_5TS_ | GCCACCATGGACTACAAAGACGATGACGACAAGagagccaagtgga | 266 |
| | cargo_3 | ggaagaagcgaatgcgGCgGTGAGTttgggcTGCATGacTGCATGgtTGC | |
| | | ATGaacacaTATTAATttccGAGGTGGTAAAATGAACAAGCACTACG | |
| | | GTTCTATCGTTCTCTGTTCTGTTAAATCCTGGCTCCAGGGAGAAA | |
| | | ACACTCAAACGTTTTTCTCCTAAAGATCTTTTAAGATTTCCAAACC | |
| | | AAATGTTTCTCCTAAGTTTTGTCCAAGGAACT | |
| 395 | RPL41_5TS_ | GCCACCATGGACTACAAAGACGATGACGACAAGagagccaagtgga | 266 |
| | cargo_4 | ggaagaagcgaatgcgGCgGTGAGTttgggcTGCATGacTGCATGgtTGC | |
| | | ATGaacacaTATTAATttccCGGTTCTATCGTTCTCTGTTCTGTTAAAT | |
| | | CCTGGCTCCAGGGAGAAAACACTCAAACGTTTTTCTCCTAAAGAT | |
| | | CTTTTAAGATTTCCAAACCAAATGTTTCTCCTAAGTTTTGTCCAAG | |
| | | GAACTTCCCTCCTCCTGGGCTGGCAAAGTC | |
| 396 | pDF0907_ | tcacactttggacctcattttcatctaaggaaggtggtataatatctcccagggataca | 337 |
| | USF1 Cargo 2 | ggaacctcagggagagataagactactgtcatgtgtgcccctctctctaccatttctgg | |
| | (pdf0114 | aaacaataccaggaggcagaattcaggcatccaacgaggaattctcttcttttttttct | |
| | based) | gcagagCaaGggAgggattctatccaaagcttgtgattatatccaggagcttcggca | |
| | | gagtaaccaccgcttgtctgaagaactgcagggacttgaccaactgcagctggacaa | |
| | | tgacgtgcttcgacaacagGACTACAAAGACGATGACGACAAGTAA | |
| 397 | PPIB 3x | atgtggcttctcagggacattgcgttcagctgcactctgtatacctcaggggtgggacc | 367 |
| | FLAG | agcacgtcactgagtgaaggaggggagggaggctctggcagttgtgcagccttcctg | |
| | | gctgggctctgagggggctggaagaatttagaacaacgacTtActctcttcttttttttc | |
| | | tgcaggaAgtTgtTcggaaggtggagagcaccaagacagacagccgggataaacc | |
| | | cctgaaggatgtgatcatcgcagactgcggcaagatcgaggtggagaagccctttgc | |
| | | catcgccaaggagGACTACAAGGACCACGACGGTGACTACAAGGAC | |
| | | CACGACATCGACTACAAGGACGACGACGACAAG | |
| 398 | PPIB XTEN | atgtggcttctcagggacattgcgttcagctgcactctgtatacctcagggggggacc | 610 |
| | 3x FLAG | agcacgtcactgagtgaaggaggggagggaggctctggcagttgtgcagccttcctg | |
| | | gctgggctctgagggggctggaagaatttagaacaacgacTtActctcttcttttttttc | |
| | | tgcaggaAgtTgtTcggaaggtggagagcaccaagacagacagccgggataaacc | |
| | | cctgaaggatgtgatcatcgcagactgcggcaagatcgaggtggagaagccctttgc | |
| | | catcgccaaggagggagggccgagctctggcgcacccccaccaagtggagggtctcc | |
| | | tgccgggtccccaacatctactgaagaaggcaccagcgaatccgcaacgcccgagtc | |
| | | aggccctggtacctccacagaaccatctgaaggtagtgcgcctggttccccagctgga | |
| | | agccctacttccaccgaagaaggcacgtcaaccgaaccaagtgaaggatctgcccct | |
| | | gggaccagcactgaaccatctgagGACTACAAGGACCACGACGGTGACT | |
| | | ACAAGGACCACGACATCGACTACAAGGACGACGACGACAAGTAA | |
| 399 | aRY1596 FL | ggaacagaaaatataaagtttctgaggagaattcaaatgaagccaaaacctcaaaa | 2047 |
| | cargo | aagatacatgcaggacctgcaggcagtatccccaagagaaggctccctgttggccag | |
| | | gtgcagtggctcacgcctgtaatgccagcactttgagaacgatTaAttctcttctttttt | |
| | | ttctgcaggatctagaacagaaaatgaaagtggtagagaatctccaggatgactttg | |
| | | atttcaactataaaaccctcaagagtcaaggagacatgcaagatctgaatggaaaca | |
| | | accagtcagtgaccaggcagaagatgcagcagctggaacagatgctcactgcgctgg | |
| | | accagatgcggagaagcatcgtgagtgagctggcggggcttttgtcagcgatggagt | |
| | | acgtgcagaaaactctcacggacgaggagctggctgactggaagaggcggcaacag | |
| | | attgcctgcattggaggcccgcccaacatctgcctagatcggctagaaaactggataa | |
| | | cgtcattagcagaatctcaacttcagacccgtcaacaaattaagaaactggaggagtt | |
| | | gcagcaaaaagtttcctacaaaggggaccccattgtacagcaccggccgatgctgga | |
| | | ggagagaatcgtggagctgtttagaaacttaatgaaaagtgcctttgtggtggagcgg | |
| | | cagccctgcatgcccatgcatcctgaccggcccctcgtcatcaagaccggcgtccagtt | |
| | | cactactaaagtcaggttgctggtcaaattccctgagttgaattatcagcttaaaatta | |
| | | aagtgtgcattgacaaagactctggggacgttgcagctctcagaggatcccggaaatt | |
| | | taacattctgggcacaaacacaaaagtgatgaacatggaagaatccaacaacggca | |
| | | gcctctctgcagaattcaaacacttgaccctgagggagcagagatgtgggaatgggg | |
| | | gccgagccaattgtgatgcttccctgattgtgactgaggagctgcacctgatcaccttt | |
| | | gagaccgaggtgtatcaccaaggcctcaagattgacctagagacccactccttgcca | |
| | | gttgtggtgatctccaacatctgtcagatgccaaatgcctgggcgtccatcctgtggta | |
| | | caacatgctgaccaacaatcccaagaatgtaaacttttttaccaagcccccaattgga | |
| | | acctgggatcaagtggccgaggtcctgagctggcagttctcctccaccaccaagcgag | |
| | | gactgagcatcgagcagctgactacactggcagagaaactcttgggacctggtgtga | |
| | | attattcagggtgtcagatcacatgggctaaattttgcaaagaaaacatggctggcaa | |
| | | gggcttctccttctgggtctggctggacaatatcattgaccttgtgaaaaagtacatcct | |
| | | ggccctttggaacgaagggtacatcatgggctttatcagtaaggagcgggagcgggc | |
| | | catcttgagcactaagcctccaggcaccttcctgctaagattcagtgaaagcagcaaa | |
| | | gaaggaggcgtcactttcacttgggtggagaaggacatcagcggtaagacccagatc | |
| | | cagtccgtggaaccatacacaaagcagcagctgaacaacatgtcatttgctgaaatc | |
| | | atcatgggctataagatcatggatgctaccaatatcctggtgtctccactggtctatctc | |
| | | tatcctgacattcccaaggaggaggcattcggaaagtattgtcggccagagagccag | |
| | | gagcatcctgaagctgacccaggcgctgccccatacctgaagaccaagtttatctgtg | |
| | | tgacaccaacgacctgcagcaataccattgacctgccgatgtccccccgcactttaga | |
| | | ttcattgatgcagtttggaaataatggtgaaggtgctgaaccctcagcaggagggcag | |
| | | tttgagtccctcacctttgacatggagttgacctcggagtgcgctacctcccccatgGA | |
| | | CTACAAAGACGATGACGACAAGTAA | |
| 400 | aRY1596 FL | ggaacagaaaatataaagtttctgaggagaattcaaatgaagccaaaacctcaaaa | 447 |
| | cargo -1600 | aagatacatgcaggacctgcaggcagtatccccaagagaaggctccctgttggccag | |
| | | gtgcagtggctcacgcctgtaatgccagcactttgagaacgatTaAttctcttctttttt | |
| | | ttctgcaggatctagaacagaaaatgaaagtggtagagaatctccaggatgactttg | |
| | | atttcaactataaaaccctcaagagtcaaggagacatgcaagatctgaatggaaaca | |
| | | accagtcagtgaccaggcagaagatgcagcagctggaacagatgctcactgcgctgg | |
| | | accagatgcggagaagcatcgtgagtgagctggcggggcttttgtcagcgatggagt | |
| | | acgtgcagaaaactctcacGACTACAAAGACGATGACGACAAGTAA | |
| 401 | aRY1596 FL | ggaacagaaaatataaagtttctgaggagaattcaaatgaagccaaaacctcaaaa | 647 |
| | cargo -1400 | aagatacatgcaggacctgcaggcagtatccccaagagaaggctccctgttggccag | |
| | | gtgcagtggctcacgcctgtaatgccagcactttgagaacgatTaAttctcttctttttt | |
| | | ttctgcaggatctagaacagaaaatgaaagtggtagagaatctccaggatgactttg | |
| | | atttcaactataaaaccctcaagagtcaaggagacatgcaagatctgaatggaaaca | |
| | | accagtcagtgaccaggcagaagatgcagcagctggaacagatgctcactgcgctgg | |
| | | accagatgcggagaagcatcgtgagtgagctggcggggcttttgtcagcgatggagt | |
| | | acgtgcagaaaactctcacggacgaggagctggctgactggaagaggcggcaacag | |
| | | attgcctgcattggaggcccgcccaacatctgcctagatcggctagaaaactggataa | |
| | | cgtcattagcagaatctcaacttcagacccgtcaacaaattaagaaactggaggagtt | |
| | | gcagcaaaaagtttcctacaaaggggaccccattgtacagcaccggcGACTACAA | |
| | | AGACGATGACGACAAGTAA | |
| 402 | aRY1596 FL | ggaacagaaaatataaagtttctgaggagaattcaaatgaagccaaaacctcaaaa | 847 |
| | cargo -1200 | aagatacatgcaggacctgcaggcagtatccccaagagaaggctccctgttggccag | |
| | | gtgcagtggctcacgcctgtaatgccagcactttgagaacgatTaAttctcttctttttt | |
| | | ttctgcaggatctagaacagaaaatgaaagtggtagagaatctccaggatgactttg | |
| | | atttcaactataaaaccctcaagagtcaaggagacatgcaagatctgaatggaaaca | |
| | | accagtcagtgaccaggcagaagatgcagcagctggaacagatgctcactgcgctgg | |
| | | accagatgcggagaagcatcgtgagtgagctggcggggcttttgtcagcgatggagt | |
| | | acgtgcagaaaactctcacggacgaggagctggctgactggaagaggcggcaacag | |
| | | attgcctgcattggaggcccgcccaacatctgcctagatcggctagaaaactggataa | |
| | | cgtcattagcagaatctcaacttcagacccgtcaacaaattaagaaactggaggagtt | |
| | | gcagcaaaaagtttcctacaaaggggaccccattgtacagcaccggccgatgctgga | |
| | | ggagagaatcgtggagctgtttagaaacttaatgaaaagtgcctttgtggtggagcgg | |
| | | cagccctgcatgcccatgcatcctgaccggcccctcgtcatcaagaccggcgtccagtt | |
| | | cactactaaagtcaggttgctggtcaaattccctgagttgaattatcagcttaaaatta | |
| | | aagtgtgcattgacGACTACAAAGACGATGACGACAAGTAA | |
| 403 | aRY1596 FL | ggaacagaaaatataaagtttctgaggagaattcaaatgaagccaaaacctcaaaa | 1047 |
| | cargo -1000 | aagatacatgcaggacctgcaggcagtatccccaagagaaggctccctgttggccag | |
| | | gtgcagtggctcacgcctgtaatgccagcactttgagaacgatTaAttctcttctttttt | |
| | | ttctgcaggatctagaacagaaaatgaaagtggtagagaatctccaggatgactttg | |
| | | atttcaactataaaaccctcaagagtcaaggagacatgcaagatctgaatggaaaca | |
| | | accagtcagtgaccaggcagaagatgcagcagctggaacagatgctcactgcgctgg | |
| | | accagatgcggagaagcatcgtgagtgagctggcggggcttttgtcagcgatggagt | |
| | | acgtgcagaaaactctcacggacgaggagctggctgactggaagaggcggcaacag | |
| | | attgcctgcattggaggcccgcccaacatctgcctagatcggctagaaaactggataa | |
| | | cgtcattagcagaatctcaacttcagacccgtcaacaaattaagaaactggaggagtt | |
| | | gcagcaaaaagtttcctacaaaggggaccccattgtacagcaccggccgatgctgga | |
| | | ggagagaatcgtggagctgtttagaaacttaatgaaaagtgcctttgtggtggagcgg | |
| | | cagccctgcatgcccatgcatcctgaccggcccctcgtcatcaagaccggcgtccagtt | |
| | | cactactaaagtcaggttgctggtcaaattccctgagttgaattatcagcttaaaatta | |
| | | aagtgtgcattgacaaagactctggggacgttgcagctctcagaggatcccggaaatt | |
| | | taacattctgggcacaaacacaaaagtgatgaacatggaagaatccaacaacggca | |
| | | gcctctctgcagaattcaaacacttgaccctgagggagcagagatgtgggaatgggg | |
| | | gccgagccaattgtgatgcttccctgattgtgactgaggagctGACTACAAAGAC | |
| | | GATGACGACAAGTAA | |
| 404 | aRY1596 FL | ggaacagaaaatataaagtttctgaggagaattcaaatgaagccaaaacctcaaaa | 1247 |
| | cargo -800 | aagatacatgcaggacctgcaggcagtatccccaagagaaggctccctgttggccag | |
| | | gtgcagtggctcacgcctgtaatgccagcactttgagaacgatTaAttctcttctttttt | |
| | | ttctgcaggatctagaacagaaaatgaaagtggtagagaatctccaggatgactttg | |
| | | atttcaactataaaaccctcaagagtcaaggagacatgcaagatctgaatggaaaca | |
| | | accagtcagtgaccaggcagaagatgcagcagctggaacagatgctcactgcgctgg | |
| | | accagatgcggagaagcatcgtgagtgagctggcggggcttttgtcagcgatggagt | |
| | | acgtgcagaaaactctcacggacgaggagctggctgactggaagaggcggcaacag | |
| | | attgcctgcattggaggcccgcccaacatctgcctagatcggctagaaaactggataa | |
| | | cgtcattagcagaatctcaacttcagacccgtcaacaaattaagaaactggaggagtt | |
| | | gcagcaaaaagtttcctacaaaggggaccccattgtacagcaccggccgatgctgga | |
| | | ggagagaatcgtggagctgtttagaaacttaatgaaaagtgcctttgtggtggagcgg | |
| | | cagccctgcatgcccatgcatcctgaccggcccctcgtcatcaagaccggcgtccagtt | |
| | | cactactaaagtcaggttgctggtcaaattccctgagttgaattatcagcttaaaatta | |
| | | aagtgtgcattgacaaagactctggggacgttgcagctctcagaggatcccggaaatt | |
| | | taacattctgggcacaaacacaaaagtgatgaacatggaagaatccaacaacggca | |
| | | gcctctctgcagaattcaaacacttgaccctgagggagcagagatgtgggaatgggg | |
| | | gccgagccaattgtgatgcttccctgattgtgactgaggagctgcacctgatcaccttt | |
| | | gagaccgaggtgtatcaccaaggcctcaagattgacctagagacccactccttgcca | |
| | | gttgtggtgatctccaacatctgtcagatgccaaatgcctgggcgtccatcctgtggta | |
| | | caacatgctgaccaacaatcccaagaatgtaaacttttttaccaagcccccaattgga | |
| | | acctgggatcGACTACAAAGACGATGACGACAAGTAA | |
| 405 | aRY1596 FL | ggaacagaaaatataaagtttctgaggagaattcaaatgaagccaaaacctcaaaa | 1447 |
| | cargo -600 | aagatacatgcaggacctgcaggcagtatccccaagagaaggctccctgttggccag | |
| | | gtgcagtggctcacgcctgtaatgccagcactttgagaacgatTaAttctcttctttttt | |
| | | ttctgcaggatctagaacagaaaatgaaagtggtagagaatctccaggatgactttg | |
| | | atttcaactataaaaccctcaagagtcaaggagacatgcaagatctgaatggaaaca | |
| | | accagtcagtgaccaggcagaagatgcagcagctggaacagatgctcactgcgctgg | |
| | | accagatgcggagaagcatcgtgagtgagctggcggggcttttgtcagcgatggagt | |
| | | acgtgcagaaaactctcacggacgaggagctggctgactggaagaggcggcaacag | |
| | | attgcctgcattggaggcccgcccaacatctgcctagatcggctagaaaactggataa | |
| | | cgtcattagcagaatctcaacttcagacccgtcaacaaattaagaaactggaggagtt | |
| | | gcagcaaaaagtttcctacaaaggggaccccattgtacagcaccggccgatgctgga | |
| | | ggagagaatcgtggagctgtttagaaacttaatgaaaagtgcctttgtggtggagcgg | |
| | | cagccctgcatgcccatgcatcctgaccggcccctcgtcatcaagaccggcgtccagtt | |
| | | cactactaaagtcaggttgctggtcaaattccctgagttgaattatcagcttaaaatta | |
| | | aagtgtgcattgacaaagactctggggacgttgcagctctcagaggatcccggaaatt | |
| | | taacattctgggcacaaacacaaaagtgatgaacatggaagaatccaacaacggca | |
| | | gcctctctgcagaattcaaacacttgaccctgagggagcagagatgtgggaatgggg | |
| | | gccgagccaattgtgatgcttccctgattgtgactgaggagctgcacctgatcaccttt | |
| | | gagaccgaggtgtatcaccaaggcctcaagattgacctagagacccactccttgcca | |
| | | gttgtggtgatctccaacatctgtcagatgccaaatgcctgggcgtccatcctgtggta | |
| | | caacatgctgaccaacaatcccaagaatgtaaacttttttaccaagcccccaattgga | |
| | | acctgggatcaagtggccgaggtcctgagctggcagttctcctccaccaccaagcgag | |
| | | gactgagcatcgagcagctgactacactggcagagaaactcttgggacctggtgtga | |
| | | attattcagggtgtcagatcacatgggctaaattttgcaaagaaaacatggctggcaa | |
| | | gggcttctccttctgggtctggctggacaatatcattGACTACAAAGACGATGA | |
| | | CGACAAGTAA | |
| 406 | aRY1596 FL | ggaacagaaaatataaagtttctgaggagaattcaaatgaagccaaaacctcaaaa | 1647 |
| | cargo -400 | aagatacatgcaggacctgcaggcagtatccccaagagaaggctccctgttggccag | |
| | | gtgcagtggctcacgcctgtaatgccagcactttgagaacgatTaAttctcttctttttt | |
| | | ttctgcaggatctagaacagaaaatgaaagtggtagagaatctccaggatgactttg | |
| | | atttcaactataaaaccctcaagagtcaaggagacatgcaagatctgaatggaaaca | |
| | | accagtcagtgaccaggcagaagatgcagcagctggaacagatgctcactgcgctgg | |
| | | accagatgcggagaagcatcgtgagtgagctggcggggcttttgtcagcgatggagt | |
| | | acgtgcagaaaactctcacggacgaggagctggctgactggaagaggcggcaacag | |
| | | attgcctgcattggaggcccgcccaacatctgcctagatcggctagaaaactggataa | |
| | | cgtcattagcagaatctcaacttcagacccgtcaacaaattaagaaactggaggagtt | |
| | | gcagcaaaaagtttcctacaaaggggaccccattgtacagcaccggccgatgctgga | |
| | | ggagagaatcgtggagctgtttagaaacttaatgaaaagtgcctttgtggtggagcgg | |
| | | cagccctgcatgcccatgcatcctgaccggcccctcgtcatcaagaccggcgtccagtt | |
| | | cactactaaagtcaggttgctggtcaaattccctgagttgaattatcagcttaaaatta | |
| | | aagtgtgcattgacaaagactctggggacgttgcagctctcagaggatcccggaaatt | |
| | | taacattctgggcacaaacacaaaagtgatgaacatggaagaatccaacaacggca | |
| | | gcctctctgcagaattcaaacacttgaccctgagggagcagagatgtgggaatgggg | |
| | | gccgagccaattgtgatgcttccctgattgtgactgaggagctgcacctgatcaccttt | |
| | | gagaccgaggtgtatcaccaaggcctcaagattgacctagagacccactccttgcca | |
| | | gttgtggtgatctccaacatctgtcagatgccaaatgcctgggcgtccatcctgtggta | |
| | | caacatgctgaccaacaatcccaagaatgtaaacttttttaccaagcccccaattgga | |
| | | acctgggatcaagtggccgaggtcctgagctggcagttctcctccaccaccaagcgag | |
| | | gactgagcatcgagcagctgactacactggcagagaaactcttgggacctggtgtga | |
| | | attattcagggtgtcagatcacatgggctaaattttgcaaagaaaacatggctggcaa | |
| | | gggcttctccttctgggtctggctggacaatatcattgaccttgtgaaaaagtacatcct | |
| | | ggccctttggaacgaagggtacatcatgggctttatcagtaaggagcgggagcgggc | |
| | | catcttgagcactaagcctccaggcaccttcctgctaagattcagtgaaagcagcaaa | |
| | | gaaggaggcgtcactttcacttgggtggagaaggacatcagcggtaagacccagatc | |
| | | cagtcGACTACAAAGACGATGACGACAAGTAA | |
| 407 | aRY1596 FL | ggaacagaaaatataaagtttctgaggagaattcaaatgaagccaaaacctcaaaa | 1847 |
| | cargo -200 | aagatacatgcaggacctgcaggcagtatccccaagagaaggctccctgttggccag | |
| | | gtgcagtggctcacgcctgtaatgccagcactttgagaacgatTaAttctcttctttttt | |
| | | ttctgcaggatctagaacagaaaatgaaagtggtagagaatctccaggatgactttg | |
| | | atttcaactataaaaccctcaagagtcaaggagacatgcaagatctgaatggaaaca | |
| | | accagtcagtgaccaggcagaagatgcagcagctggaacagatgctcactgcgctgg | |
| | | accagatgcggagaagcatcgtgagtgagctggcggggcttttgtcagcgatggagt | |
| | | acgtgcagaaaactctcacggacgaggagctggctgactggaagaggcggcaacag | |
| | | attgcctgcattggaggcccgcccaacatctgcctagatcggctagaaaactggataa | |
| | | cgtcattagcagaatctcaacttcagacccgtcaacaaattaagaaactggaggagtt | |
| | | gcagcaaaaagtttcctacaaaggggaccccattgtacagcaccggccgatgctgga | |
| | | ggagagaatcgtggagctgtttagaaacttaatgaaaagtgcctttgtggtggagcgg | |
| | | cagccctgcatgcccatgcatcctgaccggcccctcgtcatcaagaccggcgtccagtt | |
| | | cactactaaagtcaggttgctggtcaaattccctgagttgaattatcagcttaaaatta | |
| | | aagtgtgcattgacaaagactctggggacgttgcagctctcagaggatcccggaaatt | |
| | | taacattctgggcacaaacacaaaagtgatgaacatggaagaatccaacaacggca | |
| | | gcctctctgcagaattcaaacacttgaccctgagggagcagagatgtgggaatgggg | |
| | | gccgagccaattgtgatgcttccctgattgtgactgaggagctgcacctgatcaccttt | |
| | | gagaccgaggtgtatcaccaaggcctcaagattgacctagagacccactccttgcca | |
| | | gttgtggtgatctccaacatctgtcagatgccaaatgcctgggcgtccatcctgtggta | |
| | | caacatgctgaccaacaatcccaagaatgtaaacttttttaccaagcccccaattgga | |
| | | acctgggatcaagtggccgaggtcctgagctggcagttctcctccaccaccaagcgag | |
| | | gactgagcatcgagcagctgactacactggcagagaaactcttgggacctggtgtga | |
| | | attattcagggtgtcagatcacatgggctaaattttgcaaagaaaacatggctggcaa | |
| | | gggcttctccttctgggtctggctggacaatatcattgaccttgtgaaaaagtacatcct | |
| | | ggccctttggaacgaagggtacatcatgggctttatcagtaaggagcgggagcgggc | |
| | | catcttgagcactaagcctccaggcaccttcctgctaagattcagtgaaagcagcaaa | |
| | | gaaggaggcgtcactttcacttgggtggagaaggacatcagcggtaagacccagatc | |
| | | cagtccgtggaaccatacacaaagcagcagctgaacaacatgtcatttgctgaaatc | |
| | | atcatgggctataagatcatggatgctaccaatatcctggtgtctccactggtctatctc | |
| | | tatcctgacattcccaaggaggaggcattcggaaagtattgtcggccagagagccag | |
| | | gagcatcctgaagctgacccaggcgctgcccGACTACAAAGACGATGACGA | |
| | | CAAGTAA | |
| 408 | pDF0873_PABPC1_ | ttgagttctattacaccactattctagaattatgaatcgctcccctgcactactctttcct | 298 |
| | 3TS_Cargo2 | tgtcctccccacactcgaaaaatatttctctttctccactagagaaagcagcagcagttg | |
| | (pDY0088 based) | agagtatggctgttggagctgatgggattaacgaggaattctcttcttttttttctgcag | |
| | 3 mutations | gtCgaCgaGgctgtagctgtactacaagcccaccaagctaaagaggctgcccagaa | |
| | in cargo | agcagttaacagtgccaccggtgttccaactgttGACTACAAAGACGATGAC | |
| | | GACAAGTAA | |
| 409 | TOP2A | caatatttattgagcacttgctatgtgtcacgcacatggacataaagtctcaatcctca | 362 |
| | cargo | aggagctcacagtccagtagaagtttgcaattaacacatattttgttaggtggtgggat | |
| | | aaacaagagaagaaaaagtgggaaagtgactgaacgaggaattctcttcttttttttc | |
| | | tgcagctcCttAgcAcgattgttatttccaccaaaagatgatcacacgttgaagttttt | |
| | | atatgatgacaaccagcgtgttgagcctgaatggtacattcctattattcccatggtgct | |
| | | gataaatggtgctgaaggaatcggtactgggtggtcctgcaaaGACTACAAAGA | |
| | | CGATGACGACAAG | |
| 410 | PPIB Hyb 50 | gaacgaggaattctcttcttttttttctgcaggaAgtTgtTcggaaggtggagagcac | 179 |
| | 1 | caagacagacagccgggataaacccctgaaggatgtgatcatcgcagactgcggca | |
| | | agatcgaggtggagaagccctttgccatcgccaaggagGACTACAAAGACGA | |
| | | TGACGACAAGTAA | |
| 411 | PPIB Hyb 50 | taatacgactcactataggggtgggaccagcacgtcactgagtgaaggaggggagg | 247 |
| | 2 | gaggctctggcagaacgaggaattctcttcttttttttctgcaggaAgtTgtTcggaag | |
| | | gtggagagcaccaagacagacagccgggataaacccctgaaggatgtgatcatcgc | |
| | | agactgcggcaagatcgaggtggagaagccctttgccatcgccaaggagGACTAC | |
| | | AAAGACGATGACGACAAGTAA | |
| 412 | PPIB Hyb 50 | taatacgactcactataggttgtgcagccttcctggctgggctctgagggggctggaa | 247 |
| | 3 | gaatttagaacaacgaggaattctcttcttttttttctgcaggaAgtTgtTcggaaggt | |
| | | ggagagcaccaagacagacagccgggataaacccctgaaggatgtgatcatcgcag | |
| | | actgcggcaagatcgaggtggagaagccctttgccatcgccaaggagGACTACA | |
| | | AAGACGATGACGACAAGTAA | |
| 413 | PPIB Hyb | gggtgggaccagcacgtcactgagtgaaggaggggagggaggctctggcagaacga | 229 |
| | 100 1 | ggaattctcttcttttttttctgcaggaAgtTgtTcggaaggtggagagcaccaagac | |
| | | agacagccgggataaacccctgaaggatgtgatcatcgcagactgcggcaagatcg | |
| | | aggtggagaagccctttgccatcgccaaggagGACTACAAAGACGATGACG | |
| | | ACAAGTAA | |
| 414 | PPIB Hyb | taatacgactcactataggggtgggaccagcacgtcactgagtgaaggaggggagg | 297 |
| | 100 2 | gaggctctggcagttgtgcagccttcctggctgggctctgagggggctggaagaattt | |
| | | agaacaacgaggaattctcttcttttttttctgcaggaAgtTgtTcggaaggtggaga | |
| | | gcaccaagacagacagccgggataaacccctgaaggatgtgatcatcgcagactgc | |
| | | ggcaagatcgaggtggagaagccctttgccatcgccaaggagGACTACAAAGA | |
| | | CGATGACGACAAGTAA | |
| 415 | STAT3_ | acagaagtaaagaaagatttccttgggaacagaaaatataaagtttctgaggagaat | 366 |
| | HYBPLUS_ | tcaaatgaagccaaaacctcaaaaaagatacatgcaggacctgcaggcagtatcccc | |
| | 25SIDES | aagagaaggctccctgttggccaggtgcagtggctcacgcctgtaatgccagcacttt | |
| | | gagaggctgagttgggaggatcacttgaaacgaggaattctcttcttttttttctgcag | |
| | | gaCctCgaGcagaaaatgaaagtggtagagaatctccaggatgactttgatttcaac | |
| | | tataaaaccctcaagagtcaaggaGACTACAAAGACGATGACGACAAGT | |
| | | AAGACTACAAAGACGATGACGACAAGTAA | |
| 416 | STAT3_ | ctgtttaaaataagcaaacaaaaaaacagaagtaaagaaagatttccttgggaaca | 416 |
| | HYBPLUS_ | gaaaatataaagtttctgaggagaattcaaatgaagccaaaacctcaaaaaagata | |
| | 50SIDES | catgcaggacctgcaggcagtatccccaagagaaggctccctgttggccaggtgcag | |
| | | tggctcacgcctgtaatgccagcactttgagaggctgagttgggaggatcacttgagc | |
| | | ccaggagttcatgatcagcctggaacgaggaattctcttcttttttttctgcaggaCctC | |
| | | gaGcagaaaatgaaagtggtagagaatctccaggatgactttgatttcaactataaa | |
| | | accctcaagagtcaaggaGACTACAAAGACGATGACGACAAGTAAGA | |
| | | CTACAAAGACGATGACGACAAGTAA | |
| 417 | STAT3_ | ggaacagaaaatataaagtttctgaggagaattcaaatgaagccaaaacctcaaaa | 366 |
| | HYBPLUS_50_ | aagatacatgcaggacctgcaggcagtatccccaagagaaggctccctgttggccag | |
| | 5PRIME | gtgcagtggctcacgcctgtaatgccagcactttgagaggctgagttgggaggatcac | |
| | | ttgagcccaggagttcatgatcagcctggaacgaggaattctcttcttttttttctgcag | |
| | | gaCctCgaGcagaaaatgaaagtggtagagaatctccaggatgactttgatttcaac | |
| | | tataaaaccctcaagagtcaaggaGACTACAAAGACGATGACGACAAGT | |
| | | AAGACTACAAAGACGATGACGACAAGTAA | |
| 418 | STAT3_ | ggaacagaaaatataaagtttctgaggagaattcaaatgaagccaaaacctcaaaa | 416 |
| | HYBPLUS_100_ | aagatacatgcaggacctgcaggcagtatccccaagagaaggctccctgttggccag | |
| | 5PRIME | gtgcagtggctcacgcctgtaatgccagcactttgagaggctgagttgggaggatcac | |
| | | ttgagcccaggagttcatgatcagcctggacaacacagggagacccccatctctaca | |
| | | aattttttttttttaattagctaacgaggaattctcttcttttttttctgcaggaCctCg | |
| | | aGcagaaaatgaaagtggtagagaatctccaggatgactttgatttcaactataaaaccc | |
| | | tcaagagtcaaggaGACTACAAAGACGATGACGACAAGTAAGACTAC | |
| | | AAAGACGATGACGACAAGTAA | |
| 419 | STAT3_ | ggaacagaaaatataaagtttctgaggagaattcaaatgaagccaaaacctcaaaa | 466 |
| | HYBPLUS_150_ | aagatacatgcaggacctgcaggcagtatccccaagagaaggctccctgttggccag | |
| | 5PRIME | gtgcagtggctcacgcctgtaatgccagcactttgagaggctgagttgggaggatcac | |
| | | ttgagcccaggagttcatgatcagcctggacaacacagggagacccccatctctaca | |
| | | aattttttttttttaattagctgggcgtggtggtgcatgcctgtggtcccggctacttggg | |
| | | aggatgaggtaaacgaggaattctcttcttttttttctgcaggaCctCgaGcagaaaa | |
| | | tgaaagtggtagagaatctccaggatgactttgatttcaactataaaaccctcaagag | |
| | | tcaaggaGACTACAAAGACGATGACGACAAGTAAGACTACAAAGA | |
| | | CGATGACGACAAGTAA | |
| 420 | STAT3_ | ctgtttaaaataagcaaacaaaaaaacagaagtaaagaaagatttccttgggaaca | 366 |
| | HYBPLUS_50_ | gaaaatataaagtttctgaggagaattcaaatgaagccaaaacctcaaaaaagata | |
| | 3PRIME | catgcaggacctgcaggcagtatccccaagagaaggctccctgttggccaggtgcag | |
| | | tggctcacgcctgtaatgccagcactttgagaacgaggaattctcttcttttttttctgca | |
| | | ggaCctCgaGcagaaaatgaaagtggtagagaatctccaggatgactttgatttcaa | |
| | | ctataaaaccctcaagagtcaaggaGACTACAAAGACGATGACGACAAG | |
| | | TAAGACTACAAAGACGATGACGACAAGTAA | |
| 421 | PPIB_wider | ATGTGGCTTCTCAGGGACATTGCGTTCAGCTGCACTCTGTATACC | 478 |
| | Cargos_150left | TCAGGGGTGGGACCAGCACGTCACTGAGTGAAGGAGGGGAGG | |
| | | GAGGCTCTGGCAGTTGTGCAGCCTTCCTGGCTGGGCTCTGAGGG | |
| | | GGCTGGAAGAATTTAGAACCTTGGAGGCATGGAGGTACAGGGT | |
| | | TTATTCTGGACAGGAGCACTGGGCTGCATCTGTGGGTTGGGTCCT | |
| | | TTTGGGAAAGGGATGGACACATGGAGCTCCTGCCCTGGGGTCTG | |
| | | TGTTGAATCCCCGGTGAGGATTGCCCAGTAGTAGCCCaacgaggaa | |
| | | ttctcttcttttttttctgcaggaAgtTgtTcggaaggtggagagcaccaagacagaca | |
| | | gccgggataaacccctgaaggatgtgatcatcgcagactgcggcaagatcgaggtgg | |
| | | agaagccctttgccatcgccaaggagGACTACAAAGACGATGACGACAAG | |
| | | TAA | |
| 422 | PPIB_wider | ATGTGGCTTCTCAGGGACATTGCGTTCAGCTGCACTCTGTATACC | 428 |
| | Cargos_100left | TCAGGGGTGGGACCAGCACGTCACTGAGTGAAGGAGGGGAGG | |
| | | GAGGCTCTGGCAGTTGTGCAGCCTTCCTGGCTGGGCTCTGAGGG | |
| | | GGCTGGAAGAATTTAGAACCTTGGAGGCATGGAGGTACAGGGT | |
| | | TTATTCTGGACAGGAGCACTGGGCTGCATCTGTGGGTTGGGTCCT | |
| | | TTTGGGAAAGGGATGGACACATGGAGCTCCTaacgaggaattctcttct | |
| | | tttttttctgcaggaAgtTgtTcggaaggtggagagcaccaagacagacagccggga | |
| | | taaacccctgaaggatgtgatcatcgcagactgcggcaagatcgaggtggagaagcc | |
| | | ctttgccatcgccaaggagGACTACAAAGACGATGACGACAAGTAA | |
| 423 | PPIB_wider | ATGTGGCTTCTCAGGGACATTGCGTTCAGCTGCACTCTGTATACC | 378 |
| | Cargos_50left | TCAGGGGTGGGACCAGCACGTCACTGAGTGAAGGAGGGGAGG | |
| | | GAGGCTCTGGCAGTTGTGCAGCCTTCCTGGCTGGGCTCTGAGGG | |
| | | GGCTGGAAGAATTTAGAACCTTGGAGGCATGGAGGTACAGGGT | |
| | | TTATTCTGGACAGGAGCACTGGGCTGaacgaggaattctcttcttttttttc | |
| | | tgcaggaAgtTgtTcggaaggtggagagcaccaagacagacagccgggataaacc | |
| | | cctgaaggatgtgatcatcgcagactgcggcaagatcgaggtggagaagccctttgc | |
| | | catcgccaaggagGACTACAAAGACGATGACGACAAGTAA | |
| 424 | PPIB_wider | CACACAAAACTGGAGGCACCAAAATTCTAACAGACTCCTGGCCA | 478 |
| | Cargos_150right | GAGCAGGGAGAATGCAGATTTGACGAGGGGGTACAGGAATTTT | |
| | | GTTCCTTTGAAGTAAGACCCAGGTTGGGCCAAGGGTGAGGAGG | |
| | | AGGAAGAGGGTGACCAGGGCATGTGGCTTCTCAGGGACATTGC | |
| | | GTTCAGCTGCACTCTGTATACCTCAGGGGTGGGACCAGCACGTC | |
| | | ACTGAGTGAAGGAGGGGAGGGAGGCTCTGGCAGTTGTGCAGCC | |
| | | TTCCTGGCTGGGCTCTGAGGGGGCTGGAAGAATTTAGAACaacga | |
| | | ggaattctcttcttttttttctgcaggaAgtTgtTcggaaggtggagagcaccaagac | |
| | | agacagccgggataaacccctgaaggatgtgatcatcgcagactgcggcaagatcg | |
| | | aggtggagaagccctttgccatcgccaaggagGACTACAAAGACGATGACG | |
| | | ACAAGTAA | |
| 425 | PPIB_wider | GGAGAATGCAGATTTGACGAGGGGGTACAGGAATTTTGTTCCTT | 428 |
| | Cargos_100right | TGAAGTAAGACCCAGGTTGGGCCAAGGGTGAGGAGGAGGAAGA | |
| | | GGGTGACCAGGGCATGTGGCTTCTCAGGGACATTGCGTTCAGCT | |
| | | GCACTCTGTATACCTCAGGGGTGGGACCAGCACGTCACTGAGTG | |
| | | AAGGAGGGGAGGGAGGCTCTGGCAGTTGTGCAGCCTTCCTGGC | |
| | | TGGGCTCTGAGGGGGCTGGAAGAATTTAGAACaacgaggaattctctt | |
| | | cttttttttctgcaggaAgtTgtTcggaaggtggagagcaccaagacagacagccgg | |
| | | gataaacccctgaaggatgtgatcatcgcagactgcggcaagatcgaggtggagaa | |
| | | gccctttgccatcgccaaggagGACTACAAAGACGATGACGACAAGTAA | |
| 426 | PPIB_wider | AAGACCCAGGTTGGGCCAAGGGTGAGGAGGAGGAAGAGGGTG | 378 |
| | Cargos_50right | ACCAGGGCATGTGGCTTCTCAGGGACATTGCGTTCAGCTGCACTC | |
| | | TGTATACCTCAGGGGTGGGACCAGCACGTCACTGAGTGAAGGAG | |
| | | GGGAGGGAGGCTCTGGCAGTTGTGCAGCCTTCCTGGCTGGGCTC | |
| | | TGAGGGGGCTGGAAGAATTTAGAACaacgaggaattctcttcttttttttct | |
| | | gcaggaAgtTgtTcggaaggtggagagcaccaagacagacagccgggataaaccc | |
| | | ctgaaggatgtgatcatcgcagactgcggcaagatcgaggtggagaagccctttgcc | |
| | | atcgccaaggagGACTACAAAGACGATGACGACAAGTAA | |
| 427 | PPIB_wider | TACAGGAATTTTGTTCCTTTGAAGTAAGACCCAGGTTGGGCCAAG | 478 |
| | Cargos_7575 | GGTGAGGAGGAGGAAGAGGGTGACCAGGGCATGTGGCTTCTCA | |
| | | GGGACATTGCGTTCAGCTGCACTCTGTATACCTCAGGGGTGGGA | |
| | | CCAGCACGTCACTGAGTGAAGGAGGGGAGGGAGGCTCTGGCAG | |
| | | TTGTGCAGCCTTCCTGGCTGGGCTCTGAGGGGGCTGGAAGAATT | |
| | | TAGAACCTTGGAGGCATGGAGGTACAGGGTTTATTCTGGACAGG | |
| | | AGCACTGGGCTGCATCTGTGGGTTGGGTCCTTTTGGGaacgaggaa | |
| | | ttctcttcttttttttctgcaggaAgtTgtTcggaaggtggagagcaccaagacagaca | |
| | | gccgggataaacccctgaaggatgtgatcatcgcagactgcggcaagatcgaggtgg | |
| | | agaagccctttgccatcgccaaggagGACTACAAAGACGATGACGACAAG | |
| | | TAA | |
| 428 | PPIB_wider | AAGACCCAGGTTGGGCCAAGGGTGAGGAGGAGGAAGAGGGTG | 428 |
| | Cargos_5050 | ACCAGGGCATGTGGCTTCTCAGGGACATTGCGTTCAGCTGCACTC | |
| | | TGTATACCTCAGGGGTGGGACCAGCACGTCACTGAGTGAAGGAG | |
| | | GGGAGGGAGGCTCTGGCAGTTGTGCAGCCTTCCTGGCTGGGCTC | |
| | | TGAGGGGGCTGGAAGAATTTAGAACCTTGGAGGCATGGAGGTA | |
| | | CAGGGTTTATTCTGGACAGGAGCACTGGGCTGaacgaggaattctctt | |
| | | cttttttttctgcaggaAgtTgtTcggaaggtggagagcaccaagacagacagccgg | |
| | | gataaacccctgaaggatgtgatcatcgcagactgcggcaagatcgaggtggagaa | |
| | | gccctttgccatcgccaaggagGACTACAAAGACGATGACGACAAGTAA | |
| 429 | PPIB_wider | GGAGGAGGAAGAGGGTGACCAGGGCATGTGGCTTCTCAGGGAC | 378 |
| | Cargos_2525 | ATTGCGTTCAGCTGCACTCTGTATACCTCAGGGGGGGACCAGCA | |
| | | CGTCACTGAGTGAAGGAGGGGAGGGAGGCTCTGGCAGTTGTGC | |
| | | AGCCTTCCTGGCTGGGCTCTGAGGGGGCTGGAAGAATTTAGAAC | |
| | | CTTGGAGGCATGGAGGTACAGGGTTaacgaggaattctcttcttttttttct | |
| | | gcaggaAgtTgtTcggaaggtggagagcaccaagacagacagccgggataaaccc | |
| | | ctgaaggatgtgatcatcgcagactgcggcaagatcgaggtggagaagccctttgcc | |
| | | atcgccaaggagGACTACAAAGACGATGACGACAAGTAA | |
| 430 | STAT3 | ggaacagaaaatataaagtttctgaggagaattcaaatgaagccaaaacctcaaaa | 304 |
| | ESE_Ax1 | aagatacatgcaggacctgcaggcagtatccccaagagaaggctccctgttggccag | |
| | | gtgcagtggctcacgcctgtaatgccagcactttgagaacgaggaattctcttctttttt | |
| | | ttctgcaggaCctCgaGcagaaaatgaaagtggtagagaatctccaggatgactttg | |
| | | atttcaactataaaaccctcaagagtcaaggaGACTACAAAGACGATGACG | |
| | | ACAAGTAAGCAAGGCGGAGGAAG | |
| 431 | STAT3 | ggaacagaaaatataaagtttctgaggagaattcaaatgaagccaaaacctcaaaa | 318 |
| | ESE_Ax2 | aagatacatgcaggacctgcaggcagtatccccaagagaaggctccctgttggccag | |
| | | gtgcagtggctcacgcctgtaatgccagcactttgagaacgaggaattctcttctttttt | |
| | | ttctgcaggaCctCgaGcagaaaatgaaagtggtagagaatctccaggatgactttg | |
| | | atttcaactataaaaccctcaagagtcaaggaGACTACAAAGACGATGACG | |
| | | ACAAGTAAGCAAGGCGGAGGAAGCAAGGCGGAGGAAG | |
| 432 | STAT3 | ggaacagaaaatataaagtttctgaggagaattcaaatgaagccaaaacctcaaaa | 334 |
| | ESE_Ax3 | aagatacatgcaggacctgcaggcagtatccccaagagaaggctccctgttggccag | |
| | | gtgcagtggctcacgcctgtaatgccagcactttgagaacgaggaattctcttctttttt | |
| | | ttctgcaggaCctCgaGcagaaaatgaaagtggtagagaatctccaggatgactttg | |
| | | atttcaactataaaaccctcaagagtcaaggaGACTACAAAGACGATGACG | |
| | | ACAAGTAAGCAAGGCGGAGGAAAGCAAGGCGGAGGAAGGCAA | |
| | | GGCGGAGGAAG | |
| 433 | STAT3 | ggaacagaaaatataaagtttctgaggagaattcaaatgaagccaaaacctcaaaa | 350 |
| | ESE_Ax4 | aagatacatgcaggacctgcaggcagtatccccaagagaaggctccctgttggccag | |
| | | gtgcagtggctcacgcctgtaatgccagcactttgagaacgaggaattctcttctttttt | |
| | | ttctgcaggaCctCgaGcagaaaatgaaagtggtagagaatctccaggatgactttg | |
| | | atttcaactataaaaccctcaagagtcaaggaGACTACAAAGACGATGACG | |
| | | ACAAGTAAGCAAGGCGGAGGAAAGCAAGGCGGAGGAAGAGCA | |
| | | AGGCGGAGGAAGGCAAGGCGGAGGAAG | |
| 434 | STAT3 | ggaacagaaaatataaagtttctgaggagaattcaaatgaagccaaaacctcaaaa | 310 |
| | ESE_Bx2 | aagatacatgcaggacctgcaggcagtatccccaagagaaggctccctgttggccag | |
| | | gtgcagtggctcacgcctgtaatgccagcactttgagaacgaggaattctcttctttttt | |
| | | ttctgcaggaCctCgaGcagaaaatgaaagtggtagagaatctccaggatgactttg | |
| | | atttcaactataaaaccctcaagagtcaaggaGACTACAAAGACGATGACG | |
| | | ACAAGTAAGCACACAGGACCACACAGGAC | |
| 435 | STAT3 | ggaacagaaaatataaagtttctgaggagaattcaaatgaagccaaaacctcaaaa | 314 |
| | ESE_Cx2 | aagatacatgcaggacctgcaggcagtatccccaagagaaggctccctgttggccag | |
| | | gtgcagtggctcacgcctgtaatgccagcactttgagaacgaggaattctcttctttttt | |
| | | ttctgcaggaCctCgaGcagaaaatgaaagtggtagagaatctccaggatgactttg | |
| | | atttcaactataaaaccctcaagagtcaaggaGACTACAAAGACGATGACG | |
| | | ACAAGTAAGAAAAAGAAAGAAAAAAAGAAAGAA | |
| 436 | STAT3 | ggaacagaaaatataaagtttctgaggagaattcaaatgaagccaaaacctcaaaa | 306 |
| | ESE_Dx2 | aagatacatgcaggacctgcaggcagtatccccaagagaaggctccctgttggccag | |
| | | gtgcagtggctcacgcctgtaatgccagcactttgagaacgaggaattctcttctttttt | |
| | | ttctgcaggaCctCgaGcagaaaatgaaagtggtagagaatctccaggatgactttg | |
| | | atttcaactataaaaccctcaagagtcaaggaGACTACAAAGACGATGACG | |
| | | ACAAGTAAGTCAGAGGATCAGAGGA | |
| 437 | SHANK3 | gaggagcctagaaggcgccgggttggcaagtgggcagggaacagagacatgctttg | 289 |
| | branchpoint | tcgtgttctcagcggagctggggtaccttggtggtctcaggcgtgagacagggactgc | |
| | v0 | ctgaaggcagaggcaccaaaagctacaagagcaaacaacgaggaAttctcttctttt | |
| | | ttttctgcagtcCCtgttCgaacgccagggcctcccaggcccagagaagctgccggg | |
| | | ctccttgcggaaggggattccacggaccaagtctGACTACAAAGACGATGAC | |
| | | GACAAGTAA | |
| 438 | SHANK3 | gaggagcctagaaggcgccgggttggcaagtgggcagggaacagagacatgctttg | 289 |
| | branchpoint | tcgtgttctcagcggagctggggtaccttggtggtctcaggcgtgagacagggactgc | |
| | v1 | ctgaaggcagaggcaccaaaagctacaagagcaaacaacgacTaActctcttctttt | |
| | | ttttctgcagtcCCtgttCgaacgccagggcctcccaggcccagagaagctgccggg | |
| | | ctccttgcggaaggggattccacggaccaagtctGACTACAAAGACGATGAC | |
| | | GACAAGTAA | |
| 439 | SHANK3 | gaggagcctagaaggcgccgggttggcaagtgggcagggaacagagacatgctttg | 289 |
| | branchpoint | tcgtgttctcagcggagctggggtaccttggtggtctcaggcgtgagacagggactgc | |
| | v3 | ctgaaggcagaggcaccaaaagctacaagagcaaacaacgatTaAttctcttctttt | |
| | | ttttctgcagtcCCtgttCgaacgccagggcctcccaggcccagagaagctgccggg | |
| | | ctccttgcggaaggggattccacggaccaagtctGACTACAAAGACGATGAC | |
| | | GACAAGTAA | |
| 440 | SHANK3 | gaggagcctagaaggcgccgggttggcaagtgggcagggaacagagacatgctttg | 289 |
| | branchpoint | tcgtgttctcagcggagctggggtaccttggtggtctcaggcgtgagacagggactgc | |
| | v6 | ctgaaggcagaggcaccaaaagctacaagagcaaacaacgatTgActctcttctttt | |
| | | ttttctgcagtcCCtgttCgaacgccagggcctcccaggcccagagaagctgccggg | |
| | | ctccttgcggaaggggattccacggaccaagtctGACTACAAAGACGATGAC | |
| | | GACAAGTAA | |
| 441 | SHANK3 | gaggagcctagaaggcgccgggttggcaagtgggcagggaacagagacatgctttg | 289 |
| | branchpoint | tcgtgttctcagcggagctggggtaccttggtggtctcaggcgtgagacagggactgc | |
| | v12 | ctgaaggcagaggcaccaaaagctacaagagcaaacaacgacTcAttctcttctttt | |
| | | ttttctgcagtcCCtgttCgaacgccagggcctcccaggcccagagaagctgccggg | |
| | | ctccttgcggaaggggattccacggaccaagtctGACTACAAAGACGATGAC | |
| | | GACAAGTAA | |
| 378 | SHANK3 | gaggagcctagaaggcgccgggttggcaagtgggcagggaacagagacatgctttg | 289 |
| | branchpoint | tcgtgttctcagcggagctggggtaccttggtggtctcaggcgtgagacagggactgc | |
| | v13 | ctgaaggcagaggcaccaaaagctacaagagcaaacaacgacTtActctcttctttt | |
| | | ttttctgcagtcCCtgttCgaacgccagggcctcccaggcccagagaagctgccggg | |
| | | ctccttgcggaaggggattccacggaccaagtctGACTACAAAGACGATGAC | |
| | | GACAAGTAA | |
| 442 | SHANK3 | gaggagcctagaaggcgccgggttggcaagtgggcagggaacagagacatgctttg | 289 |
| | branchpoint | tcgtgttctcagcggagctggggtaccttggtggtctcaggcgtgagacagggactgc | |
| | v15 | ctgaaggcagaggcaccaaaagctacaagagcaaacaacgatTtAttctcttcttttt | |
| | | tttctgcagtcCCtgttCgaacgccagggcctcccaggcccagagaagctgccgggc | |
| | | tccttgcggaaggggattccacggaccaagtctGACTACAAAGACGATGACG | |
| | | ACAAGTAA | |
| 443 | SHANK3 | gaggagcctagaaggcgccgggttggcaagtgggcagggaacagagacatgctttg | 289 |
| | branchpoint | tcgtgttctcagcggagctggggtaccttggtggtctcaggcgtgagacagggactgc | |
| | yeast | ctgaaggcagaggcaccaaaagctacaagagcaaacaacTACTAACtctcttcttt | |
| | | tttttctgcagtcCCtgttCgaacgccagggcctcccaggcccagagaagctgccggg | |
| | | ctccttgcggaaggggattccacggaccaagtctGACTACAAAGACGATGAC | |
| | | GACAAGTAA | |
| 444 | SHANK3_ | GAGGAGCCTAGAAGGCGCCGGGTTGGCAAGTGGGCAGGGAAC | 304 |
| | ESE_Ax1 | AGAGACATGCTTTGTCGTGTTCTCAGCGGAGCTGGGGTACCTTG | |
| | | GTGGTCTCAGGCGTGAGACAGGGACTGCCTGAAGGCAGAGGCA | |
| | | CCAAAAGCTACAAGAGCAAACaacgaggaattctcttcttttttttctgcagtc | |
| | | CCtgttCgaacgccagggcctcccaggcccagagaagctgccgggctccttgcggaa | |
| | | ggggattccacggaccaagtctGACTACAAAGACGATGACGACAAGTAA | |
| | | GCAAGGCGGAGGAAG | |
| 445 | SHANK3_ | GAGGAGCCTAGAAGGCGCCGGGTTGGCAAGTGGGCAGGGAAC | 318 |
| | ESE_Ax2 | AGAGACATGCTTTGTCGTGTTCTCAGCGGAGCTGGGGTACCTTG | |
| | | GTGGTCTCAGGCGTGAGACAGGGACTGCCTGAAGGCAGAGGCA | |
| | | CCAAAAGCTACAAGAGCAAACaacgaggaattctcttcttttttttctgcagtc | |
| | | CCtgttCgaacgccagggcctcccaggcccagagaagctgccgggctccttgcggaa | |
| | | ggggattccacggaccaagtctGACTACAAAGACGATGACGACAAGTAA | |
| | | GCAAGGCGGAGGAAGCAAGGCGGAGGAAG | |
| 446 | SHANK3_ | GAGGAGCCTAGAAGGCGCCGGGTTGGCAAGTGGGCAGGGAAC | 334 |
| | ESE_Ax3 | AGAGACATGCTTTGTCGTGTTCTCAGCGGAGCTGGGGTACCTTG | |
| | | GTGGTCTCAGGCGTGAGACAGGGACTGCCTGAAGGCAGAGGCA | |
| | | CCAAAAGCTACAAGAGCAAACaacgaggaattctcttcttttttttctgcagtc | |
| | | CCtgttCgaacgccagggcctcccaggcccagagaagctgccgggctccttgcggaa | |
| | | ggggattccacggaccaagtctGACTACAAAGACGATGACGACAAGTAA | |
| | | GCAAGGCGGAGGAAAGCAAGGCGGAGGAAGGCAAGGCGGAGG | |
| | | AAG | |
| 447 | SHANK3_ | GAGGAGCCTAGAAGGCGCCGGGTTGGCAAGTGGGCAGGGAAC | 350 |
| | ESE_Ax4 | AGAGACATGCTTTGTCGTGTTCTCAGCGGAGCTGGGGTACCTTG | |
| | | GTGGTCTCAGGCGTGAGACAGGGACTGCCTGAAGGCAGAGGCA | |
| | | CCAAAAGCTACAAGAGCAAACaacgaggaattctcttcttttttttctgcagtc | |
| | | CCtgttCgaacgccagggcctcccaggcccagagaagctgccgggctccttgcggaa | |
| | | ggggattccacggaccaagtctGACTACAAAGACGATGACGACAAGTAA | |
| | | GCAAGGCGGAGGAAAGCAAGGCGGAGGAAGAGCAAGGCGGAG | |
| | | GAAGGCAAGGCGGAGGAAG | |
| 448 | SHANK3_ | GAGGAGCCTAGAAGGCGCCGGGTTGGCAAGTGGGCAGGGAAC | 310 |
| | ESE_Bx2 | AGAGACATGCTTTGTCGTGTTCTCAGCGGAGCTGGGGTACCTTG | |
| | | GTGGTCTCAGGCGTGAGACAGGGACTGCCTGAAGGCAGAGGCA | |
| | | CCAAAAGCTACAAGAGCAAACaacgaggaattctcttcttttttttctgcagtc | |
| | | CCtgttCgaacgccagggcctcccaggcccagagaagctgccgggctccttgcggaa | |
| | | ggggattccacggaccaagtctGACTACAAAGACGATGACGACAAGTAA | |
| | | GCACACAGGACCACACAGGAC | |
| 449 | SHANK3_ | GAGGAGCCTAGAAGGCGCCGGGTTGGCAAGTGGGCAGGGAAC | 331 |
| | ESE_Bx4 | AGAGACATGCTTTGTCGTGTTCTCAGCGGAGCTGGGGTACCTTG | |
| | | GTGGTCTCAGGCGTGAGACAGGGACTGCCTGAAGGCAGAGGCA | |
| | | CCAAAAGCTACAAGAGCAAACaacgaggaattctcttcttttttttctgcagtc | |
| | | CCtgttCgaacgccagggcctcccaggcccagagaagctgccgggctccttgcggaa | |
| | | ggggattccacggaccaagtctGACTACAAAGACGATGACGACAAGTAA | |
| | | GCACACAGGACCACACAGGACGCACACAGGACCACACAGGAC | |
| 450 | SHANK3_ | GAGGAGCCTAGAAGGCGCCGGGTTGGCAAGTGGGCAGGGAAC | 314 |
| | ESE_Cx2 | AGAGACATGCTTTGTCGTGTTCTCAGCGGAGCTGGGGTACCTTG | |
| | | GTGGTCTCAGGCGTGAGACAGGGACTGCCTGAAGGCAGAGGCA | |
| | | CCAAAAGCTACAAGAGCAAACaacgaggaattctcttcttttttttctgcagtc | |
| | | CCtgttCgaacgccagggcctcccaggcccagagaagctgccgggctccttgcggaa | |
| | | ggggattccacggaccaagtctGACTACAAAGACGATGACGACAAGTAA | |
| | | GAAAAAGAAAGAAAAAAAGAAAGAA | |
| 612 | SHANK3_ | GAGGAGCCTAGAAGGCGCCGGGTTGGCAAGTGGGCAGGGAAC | 339 |
| | ESE_Cx4 | AGAGACATGCTTTGTCGTGTTCTCAGCGGAGCTGGGGTACCTTG | |
| | | GTGGTCTCAGGCGTGAGACAGGGACTGCCTGAAGGCAGAGGCA | |
| | | CCAAAAGCTACAAGAGCAAACaacgaggaattctcttcttttttttctgcagtc | |
| | | CCtgttCgaacgccagggcctcccaggcccagagaagctgccgggctccttgcggaa | |
| | | ggggattccacggaccaagtctGACTACAAAGACGATGACGACAAGTAA | |
| | | GAAAAAGAAAGAAAAAAAGAAAGAAGAAAAAGAAAGAAAAAA | |
| | | AGAAAGAA | |
| 451 | SHANK3_ | GAGGAGCCTAGAAGGCGCCGGGTTGGCAAGTGGGCAGGGAAC | 306 |
| | ESE_Dx2 | AGAGACATGCTTTGTCGTGTTCTCAGCGGAGCTGGGGTACCTTG | |
| | | GTGGTCTCAGGCGTGAGACAGGGACTGCCTGAAGGCAGAGGCA | |
| | | CCAAAAGCTACAAGAGCAAACaacgaggaattctcttcttttttttctgcagtc | |
| | | CCtgttCgaacgccagggcctcccaggcccagagaagctgccgggctccttgcggaa | |
| | | ggggattccacggaccaagtctGACTACAAAGACGATGACGACAAGTAA | |
| | | GTCAGAGGATCAGAGGA | |
| 452 | SHANK3_ | GAGGAGCCTAGAAGGCGCCGGGTTGGCAAGTGGGCAGGGAAC | 323 |
| | ESE_Dx4 | AGAGACATGCTTTGTCGTGTTCTCAGCGGAGCTGGGGTACCTTG | |
| | | GTGGTCTCAGGCGTGAGACAGGGACTGCCTGAAGGCAGAGGCA | |
| | | CCAAAAGCTACAAGAGCAAACaacgaggaattctcttcttttttttctgcagtc | |
| | | CCtgttCgaacgccagggcctcccaggcccagagaagctgccgggctccttgcggaa | |
| | | ggggattccacggaccaagtctGACTACAAAGACGATGACGACAAGTAA | |
| | | GTCAGAGGATCAGAGGAGTCAGAGGATCAGAGGA | |
| 453 | USF1 ITS | tcacactttggacctcattttcatctaaggaaggtggtataatatctcccagggataca | 511 |
| | cargo 1 | ggaacctcagggagagataagactactgtcatgtgtgcccctctctctaccatttctgg | |
| | | aaacaataccaggaggcagaattcaggcatccaacgacTaActctcttcttttttttct | |
| | | gcagagCaaGggAgggattctatccaaagcttgtgattatatccaggagcttcggca | |
| | | gagtaaccaccgcttgtctgaagaactgcagggacttgaccaactgcagctggacaa | |
| | | tgacgtgctCcgTcaGcagGTAAGTttgggcTGCATGacTGCATGgtTGCA | |
| | | TGaacacaTATTAATttccGTAGTAAAGCTGGCACTTCCAAGCCCCT | |
| | | GAATGTATTCAGACATCCACTGGTGAGGGGGAAAAGATGAAGCC | |
| | | TTCTCCATGGAGAACAAAGTAGAGGGTGTCAAACTGGGTCAGTG | |
| | | GCTAGCAGAACTGAGAAGGGCTGCACTGGGGGTA | |
| 454 | USF1 ITS | TTGACCAAGTGGAGGGTGCTCTTCCAGCTCTTGAACAGGACCTA | 511 |
| | cargo 2 | GAGAGTTGGATGTATTAGATGGGCGTACGCAgTATGTGCCCAGT | |
| | | TGTATGATTGTGCGTTTTCAAGGAAGGGAGTGTGCGTCGATTCGT | |
| | | TCAGTATCGACAgGGGGaacgacTaActctcttcttttttttctgcagagCaa | |
| | | GggAgggattctatccaaagcttgtgattatatccaggagcttcggcagagtaacca | |
| | | ccgcttgtctgaagaactgcagggacttgaccaactgcagctggacaatgacgtgctC | |
| | | cgTcaGcagGTAAGTttgggcTGCATGacTGCATGgtTGCATGaacacaT | |
| | | ATTAATttccGTAGTAAAGCTGGCACTTCCAAGCCCCTGAATGTAT | |
| | | TCAGACATCCACTGGTGAGGGGGAAAAGATGAAGCCTTCTCCAT | |
| | | GGAGAACAAAGTAGAGGGTGTCAAACTGGGTCAGTGGCTAGCA | |
| | | GAACTGAGAAGGGCTGCACTGGGGGTA | |
| 455 | USF1 ITS | tcacactttggacctcattttcatctaaggaaggtggtataatatctcccagggataca | 511 |
| | cargo 3 | ggaacctcagggagagataagactactgtcatgtgtgcccctctctctaccatttctgg | |
| | | aaacaataccaggaggcagaattcaggcatccaacgacTaActctcttcttttttttct | |
| | | gcagagCaaGggAgggattctatccaaagcttgtgattatatccaggagcttcggca | |
| | | gagtaaccaccgcttgtctgaagaactgcagggacttgaccaactgcagctggacaa | |
| | | tgacgtgctCcgTcaGcagGTAAGTttgggcTGCATGacTGCATGgtTGCA | |
| | | TGaacacaTATTAATttccTTGACCAAGTGGAGGGTGCTCTTCCAGC | |
| | | TCTTGAACAGGACCTAGAGAGTTGGATGTATTAGATGGGCGTAC | |
| | | GCAgTATGTGCCCAGTTGTATGATTGTGCGTTTTCAAGGAAGGGA | |
| | | GTGTGCGTCGATTCGTTCAGTATCGACAgGGGG | |
| 456 | USF1 ITS | TTGACCAAGTGGAGGGTGCTCTTCCAGCTCTTGAACAGGACCTA | 511 |
| | cargo 4 | GAGAGTTGGATGTATTAGATGGGCGTACGCAgTATGTGCCCAGT | |
| | | TGTATGATTGTGCGTTTTCAAGGAAGGGAGTGTGCGTCGATTCGT | |
| | | TCAGTATCGACAgGGGGaacgacTaActctcttcttttttttctgcagagCaa | |
| | | GggAgggattctatccaaagcttgtgattatatccaggagcttcggcagagtaacca | |
| | | ccgcttgtctgaagaactgcagggacttgaccaactgcagctggacaatgacgtgctC | |
| | | cgTcaGcagGTAAGTttgggcTGCATGacTGCATGgtTGCATGaacacaT | |
| | | ATTAATttccCTATTCAGGGATTGACTGATACCGGAAGACATCTCA | |
| | | GTTGAAGTGGTCTATACGACAGAGACCGTGCACCTACCAAATCTC | |
| | | CTTAGTGTAAGTTCAGACCAATTGGTAGTTTGTCCAGAACTCAGA | |
| | | TTTTAACAGCAGAGGACGCATGCT | |
| 457 | HTT_opt_ | gcccggctgtggctgaggagccCctCcaccgaccGTAAGTttgggcTGCATGac | 235 |
| | hyb1_ISE_BP_ | TGCATGgtTGCATGaacacaTATTAATttccatatgtgttgaattacccactcc | |
| | cargo1 | acttagttctacacctcattcattcattcagtgagtgtttctcgactactatgaataaacc | |
| | | gttatactccatgttgcgggcagaatggggatctggacagggaagcacagggcacga | |
| | | gttcaccaa | |
| 458 | HTT_opt_ | gcccggctgtggctgaggagccCctCcaccgaccGTAAGTttgggcTGCATGac | 224 |
| | hyb1_ISE_noBP_ | TGCATGgtTGCATGaacacaatatgtgttgaattacccactccacttagttctaca | |
| | cargo2 | cctcattcattcattcagtgagtgtttctcgactactatgaataaaccgttatactccatg | |
| | | ttgcgggcagaatggggatctggacagggaagcacagggcacgagttcaccaa | |
| 371 | HTT_opt_ | gcccggctgtggctgaggagccCctCcaccgaccGTAAGTttgggcTGCATGac | 235 |
| | hyb2_ISE_BP_ | TGCATGgtTGCATGaacacaTATTAATttcctccacttagttctacacctcattc | |
| | cargo3 | attcattcagtgagtgtttctcgactactatgaataaaccgttatactccatgttgcggg | |
| | | cagaatggggatctggacagggaagcacagggcacgagttcaccaatggctgtcaa | |
| | | gctacgctgc | |
| 459 | HTT_opt_ | gcccggctgtggctgaggagccCctCcaccgaccGTAAGTttgggcTGCATGac | 224 |
| | hyb2_ISE_noBP_ | TGCATGgtTGCATGaacacatccacttagttctacacctcattcattcattcagtg | |
| | cargo4 | agtgtttctcgactactatgaataaaccgttatactccatgttgcgggcagaatgggga | |
| | | tctggacagggaagcacagggcacgagttcaccaatggctgtcaagctacgctgc | |
| 460 | HTT_opt_ | gcccggctgtggctgaggagccCctCcaccgaccGTAAGTttgggcTGCATGac | 251 |
| | hyb3_ISE_BP_ | TGCATGgtTGCATGaacacaTATTAATttccttcttttttttattttaaaataaa | |
| | PPT_cargo5 | aaaaagaaggaaattaatatgtgttgaattacccactccacttagttctacacctcatt | |
| | | cattcattcagtgagtgtttctcgactactatgaataaaccgttatactccatgttgcgg | |
| | | gcagaatggggatctggacaggg | |
| 461 | HTT_opt_ | gcccggctgtggctgaggagccCctCcaccgaccGTAAGTttgggcaacacaTA | 213 |
| | hyb1_noISE_ | TTAATttccatatgtgttgaattacccactccacttagttctacacctcattcattcatt | |
| | BP_cargo6 | cagtgagtgtttctcgactactatgaataaaccgttatactccatgttgcgggcagaat | |
| | | ggggatctggacagggaagcacagggcacgagttcaccaa | |
| 462 | HTT_opt_ | gcccggctgtggctgaggagccCctCcaccgaccGTAAGTttgggcTGCATGac | 185 |
| | hyb1(100 bp)_ | TGCATGgtTGCATGaacacaTATTAATttccatatgtgttgaattacccactcc | |
| | ISE_BP_cargo7 | acttagttctacacctcattcattcattcagtgagtgtttctcgactactatgaataaacc | |
| | | gttatactccatgttg | |
| 463 | HTT_opt_ | gcccggctgtggctgaggagccCctCcaccgaccGTAAGTttggatacttacctgg | 401 |
| | hyb1_ | caggggagataccatgatcacgaaggtggttttcccagggcgaggcttatccattgca | |
| | U1snRNA(FL)_ | ctccggatgtgctgacccctgcgatttccccaaatgtgggaaactcgactgcataattt | |
| | ISE_BP_ | gtggtagtgggggactgcgttcgcgctttcccctggccaTGCATGacTGCATGgt | |
| | cargo8 | TGCATGaacacaTATTAATttccatatgtgttgaattacccactccacttagttct | |
| | | acacctcattcattcattcagtgagtgtttctcgactactatgaataaaccgttatactc | |
| | | catgttgcgggcagaatggggatctggacagggaagcacagggcacgagttcacca | |
| | | a | |
| 464 | HTT_opt_ | gcccggctgtggctgaggagccCctCcaccgaccGTAAGTttggataatttgtggt | 279 |
| | hyb1_ | agtgggggactgcgttcgcgctttcccctggccaTGCATGacTGCATGgtTGCA | |
| | U1snRNA(sm&SL4)_ | TGaacacaTATTAATttccatatgtgttgaattacccactccacttagttctacacct | |
| | ISE_BP_cargo9 | cattcattcattcagtgagtgtttctcgactactatgaataaaccgttatactccatgttg | |
| | | cgggcagaatggggatctggacagggaagcacagggcacgagttcaccaa | |

[0246] Table 15 shows the protein for nuclease/reporter constructs.

| SEQ | | | |
|---|---|---|---|
| ID NO | ID | Sequence | Length |
| 465 | SMALL | MTTTMKISIEFLEPFRMTKWQESTRRNKNNKEFVRGQA | 1529 |
| | CAS | FARWHRNKKDNTKGRPYITGTLLRSAVIRSAENLLTLS | |
| | R1045- | DGKISEKTCCPGKFDTEDKDRLLQLRQRSTLRWTDKNP | |
| | GGGS- | CPDNAETYCPFCELLGRSGNDGKKAEKKDWRFRIHFGN | |
| | R1122 | LSLPGKPDFDGPKAIGSQRVLNRVDFKSGKAHDFFKAY | |
| | | EVDHTRFPRFEGEITIDNKVSAEARKLLCDSLKFTDRL | |
| | | CGALCVIRFDEYTPAADSGKQTENVQAEPNANLAEKTA | |
| | | EQIISILDDNKKTEYTRLLADAIRSLRRSSKLVAGLPK | |
| | | DHDGKDDHYLWDIGKKKKDENSVTIRQILTTSADTKEL | |
| | | KNAGKWREFCEKLGEALYLKSKDMSGGLKITRRILGDA | |
| | | EFHGKPDRLEKSRSVSIGSVLKETVVCGELVAKTPFFF | |
| | | GAIDEDAKQTDLQVLLTPDNKYRLPRSAVRGILRRDLQ | |
| | | TYFDSPCNAELGGRPCMCKTCRIMRGITVMDARSEYNA | |
| | | PPEIRHRTRINPFTGTVAEGALFNMEVAPEGIVEPFQL | |
| | | RYRGSEDGLPDALKTVLKWWAEGQAFMSGAASTGKGRF | |
| | | RMENAKYETLDLSDENQRNDYLKNWGWRDEKGLEELKK | |
| | | RLNSGLPEPGNYRDPKWHEINVSIEMASPFINGDPIRA | |
| | | AVDKRGTDVVTFVKYKAEGEEAKPVCAYKAESFRGVIR | |
| | | SAVARIHMEDGVPLTELTHSDCECLLCQIFGSEYEAGK | |
| | | IRFEDLVFESDPEPVTFDHVAIDRFTGGAADKKKFDDS | |
| | | PLPGSPARPLMLKGSFWIRRDVLEDEEYCKALGKALAD | |
| | | VNNGLYPLGGKSAIGYGQVKSLGIKGDDKRISRLMNPA | |
| | | FDETDVAVPEKPKTDAEVRIEAEKVYYPHYFVEPHKKV | |
| | | EREEKPCGHQKFHEGRLTGKIRCKLITKTPLIVPDTSN | |
| | | DDFFRPADKEARKEKDEYHKSYAFFRLHKQIMIPGSEL | |
| | | RGMVSSVYETVTNSCFRIFDETKRLSWRMDADHQNVLQ | |
| | | DFLPGRVTADGKHIQKFSETARVPFYDKTQKHFDILDE | |
| | | QEIAGEKPVRMWVKRFIKRGGGSRDSRYQKAFQEIPEN | |
| | | DPDGWECKEGYLHVVGPSKVEFSDKKGDVINNFQGTLP | |
| | | SVPNDWKTIRTNDFKNRKRKNEPVFCCEDDKGNYYTMA | |
| | | KYCETFFFDLKENEEYEIPEKARIKYKELLRVYNNNPQ | |
| | | AVPESVFQSRVARENVEKLKSGDLVYFKHNEKYVEDIV | |
| | | PVRISRTVDDRMIGKRMSADLRPCHGDWVEDGDLSALN | |
| | | AYPEKRLLLRHPKGLCPACRLFGTGSYKGRVRFGFASL | |
| | | ENDPEWLIPGKNPGDPFHGGPVMLSLLERPRPTWSIPG | |
| | | SDNKFKVPGRKFYVHHHAWKTIKDGNHPTTGKAIEQSP | |
| | | NNRTVEALAGGNSFSFEIAFENLKEWELGLLIHSLQLE | |
| | | KGLAHKLGMAKSMGFGSVEIDVESVRLRKDWKQWRNGN | |
| | | SEIPNWLGKGFAKLKEWFRDELDFIENLKKLLWFPEGD | |
| | | QAPRVCYPMLRKKDDPNGNSGYEELKDGEFKKEDRQKK | |
| | | LTTPWTPWA | |
| 466 | SMALL | MKRTADGSEFESPKKKRKVTTTMKISIEFLEPFRMTKW | 1354 |
| | CAS | QESTRRNKNNKEFVRGQAFARWHRNKKDNTKGRPYITG | |
| | S1006- | TLLRSAVIRSAENLLTLSDGKISEKTCCPGKFDTEDKD | |
| | GGGS- | RLLQLRQRSTLRWTDKNPCPDNAETYCPFCELLGRSGN | |
| | D1221 | DGKKAEKKDWRFRIHFGNLSLPGKPDFDGPKAIGSQRV | |
| | | LNRVDFKSGKAHDFFKAYEVDHTRFPRFEGEITIDNKV | |
| | | SAEARKLLCDSLKFTDRLCGALCVIRFDEYTPAADSGK | |
| | | QTENVQAEPNANLAEKTAEQIISILDDNKKTEYTRLLA | |
| | | DAIRSLRRSSKLVAGLPKDHDGKDDHYLWDIGKKKKDE | |
| | | NSVTIRQILTTSADTKELKNAGKWREFCEKLGEALYLK | |
| | | SKDMSGGLKITRRILGDAEFHGKPDRLEKSRSVSIGSV | |
| | | LKETVVCGELVAKTPFFFGAIDEDAKQTDLQVLLTPDN | |
| | | KYRLPRSAVRGILRRDLQTYFDSPCNAELGGRPCMCKT | |
| | | CRIMRGITVMDARSEYNAPPEIRHRTRINPFTGTVAEG | |
| | | ALFNMEVAPEGIVFPFQLRYRGSEDGLPDALKTVLKWW | |
| | | AEGQAFMSGAASTGKGRFRMENAKYETLDLSDENQRND | |
| | | YLKNWGWRDEKGLEELKKRLNSGLPEPGNYRDPKWHEI | |
| | | NVSIEMASPFINGDPIRAAVDKRGTDVVTFVKYKAEGE | |
| | | EAKPVCAYKAESFRGVIRSAVARIHMEDGVPLTELTHS | |
| | | DCECLLCQIFGSEYEAGKIRFEDLVFESDPEPVTFDHV | |
| | | AIDRFTGGAADKKKFDDSPLPGSPARPLMLKGSFWIRR | |
| | | DVLEDEEYCKALGKALADVNNGLYPLGGKSAIGYGQVK | |
| | | SLGIKGDDKRISRLMNPAFDETDVAVPEKPKTDAEVRI | |
| | | EAEKVYYPHYFVEPHKKVEREEKPCGHQKFHEGRLTGK | |
| | | IRCKLITKTPLIVPDTSNDDFFRPADKEARKEKDEYHK | |
| | | SYAFFRLHKQIMIPGSELRGMVSSVYETVTNSCFRIFD | |
| | | ETKRLSWRMDADHQNVLQDFLPGRVTADGKHIQKFSGG | |
| | | GSRTVDDRMIGKRMSADLRPCHGDWVEDGDLSALNAYP | |
| | | EKRLLLRHPKGLCPACRLFGTGSYKGRVRFGFASLEND | |
| | | PEWLIPGKNPGDPFHGGPVMLSLLERPRPTWSIPGSDN | |
| | | KFKVPGRKFYVHHHAWKTIKDGNHPTTGKAIEQSPNNR | |
| | | TVEALAGGNSFSFEIAFENLKEWELGLLIHSLQLEKGL | |
| | | AHKLGMAKSMGFGSVEIDVESVRLRKDWKQWRNGNSEI | |
| | | PNWLGKGFAKLKEWFRDELDFIENLKKLLWFPEGDQAP | |
| | | RVCYPMLRKKDDPNGNSGYEELKDGEFKKEDRQKKLTT | |
| | | PWTPWAKRTADGSEFESPKKKRKV | |
| 467 | SMALL | MKRTADGSEFESPKKKRKVTTTMKISIEFLEPFRMTKW | 1326 |
| | CAS | QESTRRNKNNKEFVRGQAFARWHRNKKDNTKGRPYITG | |
| | R978- | TLLRSAVIRSAENLLTLSDGKISEKTCCPGKFDTEDKD | |
| | GGGS- | RLLQLRQRSTLRWTDKNPCPDNAETYCPFCELLGRSGN | |
| | R1294 | DGKKAEKKDWRFRIHFGNLSLPGKPDFDGPKAIGSQRV | |
| | | LNRVDFKSGKAHDFFKAYEVDHTRFPRFEGEITIDNKV | |
| | | SAEARKLLCDSLKFTDRLCGALCVIRFDEYTPAADSGK | |
| | | QTENVQAEPNANLAEKTAEQIISILDDNKKTEYTRLLA | |
| | | DAIRSLRRSSKLVAGLPKDHDGKDDHYLWDIGKKKKDE | |
| | | NSVTIRQILTTSADTKELKNAGKWREFCEKLGEALYLK | |
| | | SKDMSGGLKITRRILGDAEFHGKPDRLEKSRSVSIGSV | |
| | | LKETVVCGELVAKTPFFFGAIDEDAKQTDLQVLLTPDN | |
| | | KYRLPRSAVRGILRRDLQTYFDSPCNAELGGRPCMCKT | |
| | | CRIMRGITVMDARSEYNAPPEIRHRTRINPFTGTVAEG | |
| | | ALFNMEVAPEGIVFPFQLRYRGSEDGLPDALKTVLKWW | |
| | | AEGQAFMSGAASTGKGRFRMENAKYETLDLSDENQRND | |
| | | YLKNWGWRDEKGLEELKKRLNSGLPEPGNYRDPKWHEI | |
| | | NVSIEMASPFINGDPIRAAVDKRGTDVVTFVKYKAEGE | |
| | | EAKPVCAYKAESFRGVIRSAVARIHMEDGVPLTELTHS | |
| | | DCECLLCQIFGSEYEAGKIRFEDLVFESDPEPVTFDHV | |
| | | AIDRFTGGAADKKKFDDSPLPGSPARPLMLKGSFWIRR | |
| | | DVLEDEEYCKALGKALADVNNGLYPLGGKSAIGYGQVK | |
| | | SLGIKGDDKRISRLMNPAFDETDVAVPEKPKTDAEVRI | |
| | | EAEKVYYPHYFVEPHKKVEREEKPCGHQKFHEGRLTGK | |
| | | IRCKLITKTPLIVPDTSNDDFFRPADKEARKEKDEYHK | |
| | | SYAFFRLHKQIMIPGSELRGMVSSVYETVTNSCFRIFD | |
| | | ETKRLSWRGGGSRTVDDRMIGKRMSADLRPCHGDWVED | |
| | | GDLSALNAYPEKRLLLRHPKGLCPACRLFGTGSYKGRV | |
| | | RFGFASLENDPEWLIPGKNPGDPFHGGPVMLSLLERPR | |
| | | PTWSIPGSDNKFKVPGRKFYVHHHAWKTIKDGNHPTTG | |
| | | KAIEQSPNNRTVEALAGGNSESFEIAFENLKEWELGLL | |
| | | IHSLQLEKGLAHKLGMAKSMGFGSVEIDVESVRLRKDW | |
| | | KQWRNGNSEIPNWLGKGFAKLKEWERDELDFIENLKKL | |
| | | LWFPEGDQAPRVCYPMLRKKDDPNGNSGYEELKDGEFK | |
| | | KEDRQKKLTTPWTPWAKRTADGSEFESPKKKRKV | |
| 2 | WT | MKRTADGSEFESPKKKRKVTTTMKISIEFLEPFRMTKW | 1637 |
| | CAS7-11 | QESTRRNKNNKEFVRGQAFARWHRNKKDNTKGRPYITG | |
| | | TLLRSAVIRSAENLLTLSDGKISEKTCCPGKFDTEDKD | |
| | | RLLQLRQRSTLRWTDKNPCPDNAETYCPFCELLGRSGN | |
| | | DGKKAEKKDWRFRIHFGNLSLPGKPDFDGPKAIGSQRV | |
| | | LNRVDFKSGKAHDFFKAYEVDHTRFPRFEGEITIDNKV | |
| | | SAEARKLLCDSLKFTDRLCGALCVIRFDEYTPAADSGK | |
| | | QTENVQAEPNANLAEKTAEQIISILDDNKKTEYTRLLA | |
| | | DAIRSLRRSSKLVAGLPKDHDGKDDHYLWDIGKKKKDE | |
| | | NSVTIRQILTTSADTKELKNAGKWREFCEKLGEALYLK | |
| | | SKDMSGGLKITRRILGDAEFHGKPDRLEKSRSVSIGSV | |
| | | LKETVVCGELVAKTPFFFGAIDEDAKQTDLQVLLTPDN | |
| | | KYRLPRSAVRGILRRDLQTYFDSPCNAELGGRPCMCKT | |
| | | CRIMRGITVMDARSEYNAPPEIRHRTRINPFTGTVAEG | |
| | | ALFNMEVAPEGIVFPFQLRYRGSEDGLPDALKTVLKWW | |
| | | AEGQAFMSGAASTGKGRFRMENAKYETLDLSDENQRND | |
| | | YLKNWGWRDEKGLEELKKRLNSGLPEPGNYRDPKWHEI | |
| | | NVSIEMASPFINGDPIRAAVDKRGTDVVTFVKYKAEGE | |
| | | EAKPVCAYKAESFRGVIRSAVARIHMEDGVPLTELTHS | |
| | | DCECLLCQIFGSEYEAGKIRFEDLVFESDPEPVTFDHV | |
| | | AIDRFTGGAADKKKFDDSPLPGSPARPLMLKGSFWIRR | |
| | | DVLEDEEYCKALGKALADVNNGLYPLGGKSAIGYGQVK | |
| | | SLGIKGDDKRISRLMNPAFDETDVAVPEKPKTDAEVRI | |
| | | EAEKVYYPHYFVEPHKKVEREEKPCGHQKFHEGRLTGK | |
| | | IRCKLITKTPLIVPDTSNDDFFRPADKEARKEKDEYHK | |
| | | SYAFFRLHKQIMIPGSELRGMVSSVYETVTNSCFRIFD | |
| | | ETKRLSWRMDADHQNVLQDFLPGRVTADGKHIQKFSET | |
| | | ARVPFYDKTQKHFDILDEQEIAGEKPVRMWVKRFIKRL | |
| | | SLVDPAKHPQKKQDNKWKRRKEGIATFIEQKNGSYYFN | |
| | | VVTNNGCTSFHLWHKPDNFDQEKLEGIQNGEKLDCWVR | |
| | | DSRYQKAFQEIPENDPDGWECKEGYLHVVGPSKVEFSD | |
| | | KKGDVINNFQGTLPSVPNDWKTIRTNDFKNRKRKNEPV | |
| | | FCCEDDKGNYYTMAKYCETFFFDLKENEEYEIPEKARI | |
| | | KYKELLRVYNNNPQAVPESVFQSRVARENVEKLKSGDL | |
| | | VYFKHNEKYVEDIVPVRISRTVDDRMIGKRMSADLRPC | |
| | | HGDWVEDGDLSALNAYPEKRLLLRHPKGLCPACRLFGT | |
| | | GSYKGRVRFGFASLENDPEWLIPGKNPGDPFHGGPVML | |
| | | SLLERPRPTWSIPGSDNKFKVPGRKFYVHHHAWKTIKD | |
| | | GNHPTTGKAIEQSPNNRTVEALAGGNSESFEIAFENLK | |
| | | EWELGLLIHSLQLEKGLAHKLGMAKSMGFGSVEIDVES | |
| | | VRLRKDWKQWRNGNSEIPNWLGKGFAKLKEWFRDELDF | |
| | | IENLKKLLWFPEGDQAPRVCYPMLRKKDDPNGNSGYEE | |
| | | LKDGEFKKEDRQKKLTTPWTPWAKRTADGSEFESPKKK | |
| | | RKV | |
| 468 | PDF0610 | MKRTADGSEFESPKKKRKVTTTMKISIEFLEPFRMTKW | 1637 |
| | dead | QESTRRNKNNKEFVRGQAFARWHRNKKDNTKGRPYITG | |
| | Cas7-11 | TLLRSAVIRSAENLLTLSDGKISEKTCCPGKFDTEDKD | |
| | | RLLQLRQRSTLRWTDKNPCPDNAETYCPFCELLGRSGN | |
| | | DGKKAEKKDWRFRIHFGNLSLPGKPDEDGPKAIGSQRV | |
| | | LNRVDFKSGKAHDFFKAYEVDHTRFPRFEGEITIDNKV | |
| | | SAEARKLLCDSLKFTDRLCGALCVIRFDEYTPAADSGK | |
| | | QTENVQAEPNANLAEKTAEQIISILDDNKKTEYTRLLA | |
| | | DAIRSLRRSSKLVAGLPKDHDGKDDHYLWDIGKKKKDE | |
| | | NSVTIRQILTTSADTKELKNAGKWREFCEKLGEALYLK | |
| | | SKDMSGGLKITRRILGDAEFHGKPDRLEKSRSVSIGSV | |
| | | LKETVVCGELVAKTPFFFGAIDEDAKQTALQVLLTPDN | |
| | | KYRLPRSAVRGILRRDLQTYFDSPCNAELGGRPCMCKT | |
| | | CRIMRGITVMDARSEYNAPPEIRHRTRINPFTGTVAEG | |
| | | ALFNMEVAPEGIVFPFQLRYRGSEDGLPDALKTVLKWW | |
| | | AEGQAFMSGAASTGKGRFRMENAKYETLDLSDENQRND | |
| | | YLKNWGWRDEKGLEELKKRLNSGLPEPGNYRDPKWHEI | |
| | | NVSIEMASPFINGDPIRAAVDKRGTAVVTFVKYKAEGE | |
| | | EAKPVCAYKAESFRGVIRSAVARIHMEDGVPLTELTHS | |
| | | DCECLLCQIFGSEYEAGKIRFEDLVFESDPEPVTFDHV | |
| | | AIDRFTGGAADKKKFDDSPLPGSPARPLMLKGSFWIRR | |
| | | DVLEDEEYCKALGKALADVNNGLYPLGGKSAIGYGQVK | |
| | | SLGIKGDDKRISRLMNPAFDETDVAVPEKPKTDAEVRI | |
| | | EAEKVYYPHYFVEPHKKVEREEKPCGHQKFHEGRLTGK | |
| | | IRCKLITKTPLIVPDTSNDDFFRPADKEARKEKDEYHK | |
| | | SYAFFRLHKQIMIPGSELRGMVSSVYETVTNSCFRIFD | |
| | | ETKRLSWRMDADHQNVLQDFLPGRVTADGKHIQKFSET | |
| | | ARVPFYDKTQKHFDILDEQEIAGEKPVRMWVKRFIKRL | |
| | | SLVDPAKHPQKKQDNKWKRRKEGIATFIEQKNGSYYFN | |
| | | VVTNNGCTSFHLWHKPDNFDQEKLEGIQNGEKLDCWVR | |
| | | DSRYQKAFQEIPENDPDGWECKEGYLHVVGPSKVEFSD | |
| | | KKGDVINNFQGTLPSVPNDWKTIRTNDFKNRKRKNEPV | |
| | | FCCEDDKGNYYTMAKYCETFFFDLKENEEYEIPEKARI | |
| | | KYKELLRVYNNNPQAVPESVFQSRVARENVEKLKSGDL | |
| | | VYFKHNEKYVEDIVPVRISRTVDDRMIGKRMSADLRPC | |
| | | HGDWVEDGDLSALNAYPEKRLLLRHPKGLCPACRLFGT | |
| | | GSYKGRVRFGFASLENDPEWLIPGKNPGDPFHGGPVML | |
| | | SLLERPRPTWSIPGSDNKFKVPGRKFYVHHHAWKTIKD | |
| | | GNHPTTGKAIEQSPNNRTVEALAGGNSESFEIAFENLK | |
| | | EWELGLLIHSLQLEKGLAHKLGMAKSMGFGSVEIDVES | |
| | | VRLRKDWKQWRNGNSEIPNWLGKGFAKLKEWERDELDF | |
| | | IENLKKLLWFPEGDQAPRVCYPMLRKKDDPNGNSGYEE | |
| | | LKDGEFKKEDRQKKLTTPWTPWAKRTADGSEFESPKKK | |
| | | RKV | |
| 469 | LwaCas13 | MKVTKVDGISHKKYIEEGKLVKSTSEENRTSERLSELL | 1458 |
| | | SIRLDIYIKNPDNASEEENRIRRENLKKFFSNKVLHLK | |
| | | DSVLYLKNRKEKNAVQDKNYSEEDISEYDLKNKNSFSV | |
| | | LKKILLNEDVNSEELEIFRKDVEAKLNKINSLKYSFEE | |
| | | NKANYQKINENNVEKVGGKSKRNIIYDYYRESAKRNDY | |
| | | INNVQEAFDKLYKKEDIEKLFFLIENSKKHEKYKIREY | |
| | | YHKIIGRKNDKENFAKIIYEEIQNVNNIKELIEKIPDM | |
| | | SELKKSQVFYKYYLDKEELNDKNIKYAFCHFVEIEMSQ | |
| | | LLKNYVYKRLSNISNDKIKRIFEYQNLKKLIENKLLNK | |
| | | LDTYVRNCGKYNYYLQVGEIATSDFIARNRQNEAFLRN | |
| | | IIGVSSVAYFSLRNILETENENGITGRMRGKTVKNNKG | |
| | | EEKYVSGEVDKIYNENKQNEVKENLKMFYSYDFNMDNK | |
| | | NEIEDFFANIDEAISSIRHGIVHFNLELEGKDIFAFKN | |
| | | IAPSEISKKMFQNEINEKKLKLKIFKQLNSANVFNYYE | |
| | | KDVIIKYLKNTKFNFVNKNIPFVPSFTKLYNKIEDLRN | |
| | | TLKFFWSVPKDKEEKDAQIYLLKNIYYGEFLNKFVKNS | |
| | | KVFFKITNEVIKINKQRNQKTGHYKYQKFENIEKTVPV | |
| | | EYLAIIQSREMINNQDKEEKNTYIDFIQQIFLKGFIDY | |
| | | LNKNNLKYIESNNNNDNNDIFSKIKIKKDNKEKYDKIL | |
| | | KNYEKHNRNKEIPHEINEFVREIKLGKILKYTENLNMF | |
| | | YLILKLLNHKELTNLKGSLEKYQSANKEETFSDELELI | |
| | | NLLNLDNNRVTEDFELEANEIGKFLDFNENKIKDRKEL | |
| | | KKFDTNKIYFDGENIIKHRAFYNIKKYGMLNLLEKIAD | |
| | | KAKYKISLKELKEYSNKKNEIEKNYTMQQNLHRKYARP | |
| | | KKDEKFNDEDYKEYEKAIGNIQKYTHLKNKVEFNELNL | |
| | | LQGLLLKILHRLVGYTSIWERDLRFRLKGEFPENHYIE | |
| | | EIFNFDNSKNVKYKSGQIVEKYINFYKELYKDNVEKRS | |
| | | IYSDKKVKKLKQEKKDLYIRNYIAHFNYIPHAEISLLE | |
| | | VLENLRKLLSYDRKLKNAIMKSIVDILKEYGFVATFKI | |
| | | GADKKIEIQTLESEKIVHLKNLKKKKLMTDRNSEELCE | |
| | | LVKVMFEYKALEGGGGSGGGGSGGGGSVSKGEELFTGV | |
| | | VPILVELDGDVNGHKFSVRGEGEGDATNGKLTLKFICT | |
| | | TGKLPVPWPTLVTTLTYGVQCFSRYPDHMKQHDFFKSA | |
| | | MPEGYVQERTISFKDDGTYKTRAEVKFEGDTLVNRIEL | |
| | | KGIDFKEDGNILGHKLEYNFNSHNVYITADKQKNGIKA | |
| | | NFKIRHNVEDGSVQLADHYQQNTPIGDGPVLLPDNHYL | |
| | | STQSKLSKDPNEKRDHMVLLEFVTAAGITLGMDELYKG | |
| | | SEGAPKKKRKVGSSYPYDVPDYAYPYDVPDYAYPYDVP | |
| | | DYAKRTADGSEFES | |
| 470 | PspCas13 | MNIPALVENQKKYFGTYSVMAMLNAQTVLDHIQKVADI | 1133 |
| | | EGEQNENNENLWFHPVMSHLYNAKNGYDKQPEKTMFII | |
| | | ERLQSYFPFLKIMAENQREYSNGKYKQNRVEVNSNDIF | |
| | | EVLKRAFGVLKMYRDLTNHYKTYEEKLNDGCEFLTSTE | |
| | | QPLSGMINNYYTVALRNMNERYGYKTEDLAFIQDKRFK | |
| | | FVKDAYGKKKSQVNTGFFLSLQDYNGDTQKKLHLSGVG | |
| | | IALLICLFLDKQYINIFLSRLPIFSSYNAQSEERRIII | |
| | | RSFGINSIKLPKDRIHSEKSNKSVAMDMLNEVKRCPDE | |
| | | LFTTLSAEKQSRFRIISDDHNEVLMKRSSDRFVPLLLQ | |
| | | YIDYGKLFDHIRFHVNMGKLRYLLKADKTCIDGQTRVR | |
| | | VIEQPLNGFGRLEEAETMRKQENGTFGNSGIRIRDFEN | |
| | | MKRDDANPANYPYIVDTYTHYILENNKVEMFINDKEDS | |
| | | APLLPVIEDDRYVVKTIPSCRMSTLEIPAMAFHMFLFG | |
| | | SKKTEKLIVDVHNRYKRLFQAMQKEEVTAENIASFGIA | |
| | | ESDLPQKILDLISGNAHGKDVDAFIRLTVDDMLTDTER | |
| | | RIKRFKDDRKSIRSADNKMGKRGFKQISTGKLADFLAK | |
| | | DIVLFQPSVNDGENKITGLNYRIMQSAIAVYDSGDDYE | |
| | | AKQQFKLMFEKARLIGKGTTEPHPFLYKVFARSIPANA | |
| | | VEFYERYLIERKFYLTGLSNEIKKGNRVDVPFIRRDQN | |
| | | KWKTPAMKTLGRIYSEDLPVELPRQMFDNEIKSHLKSL | |
| | | PQMEGIDFNNANVTYLIAEYMKRVLDDDFQTFYQWNRN | |
| | | YRYMDMLKGEYDRKGSLQHCFTSVEEREGLWKERASRT | |
| | | ERYRKQASNKIRSNRQMRNASSEEIETILDKRLSNSRN | |
| | | EYQKSEKVIRRYRVQDALLFLLAKKTLTELADEDGERF | |
| | | KLKEIMPDAEKGILSEIMPMSFTFEKGGKKYTITSEGM | |
| | | KLKNYGDFFVLASDKRIGNLLELVGSDIVSKEDIMEEF | |
| | | NKYDQCRPEISSIVFNLEKWAFDTYPELSARVDREEKV | |
| | | DFKSILKILLNNKNINKEQSDILRKIRNAFDHNNYPDK | |
| | | GVVEIKALPEIAMSIKKAFGEYAIMKGSLQLPPLERLT | |
| | | LGSSYPYDVPDYAYPYDVPDYAYPYDVPDYA | |
| 471 | RfxCas13 | MSPKKKRKVEASIEKKKSFAKGMGVKSTLVSGSKVYMT | 1016 |
| | | TFAEGSDARLEKIVEGDSIRSVNEGEAFSAEMADKNAG | |
| | | YKIGNAKFSHPKGYAVVANNPLYTGPVQQDMLGLKETL | |
| | | EKRYFGESADGNDNICIQVIHNILDIEKILAEYITNAA | |
| | | YAVNNISGLDKDIIGFGKFSTVYTYDEFKDPEHHRAAF | |
| | | NNNDKLINAIKAQYDEFDNFLDNPRLGYFGQAFFSKEG | |
| | | RNYIINYGNECYDILALLSGLRHWVVHNNEEESRISRT | |
| | | WLYNLDKNLDNEYISTLNYLYDRITNELTNSFSKNSAA | |
| | | NVNYIAETLGINPAEFAEQYFRFSIMKEQKNLGFNITK | |
| | | LREVMLDRKDMSEIRKNHKVFDSIRTKVYTMMDFVIYR | |
| | | YYIEEDAKVAAANKSLPDNEKSLSEKDIFVINLRGSFN | |
| | | DDQKDALYYDEANRIWRKLENIMHNIKEFRGNKTREYK | |
| | | KKDAPRLPRILPAGRDVSAFSKLMYALTMFLDGKEIND | |
| | | LLTTLINKFDNIQSFLKVMPLIGVNAKFVEEYAFFKDS | |
| | | AKIADELRLIKSFARMGEPIADARRAMYIDAIRILGTN | |
| | | LSYDELKALADTFSLDENGNKLKKGKHGMRNFIINNVI | |
| | | SNKRFHYLIRYGDPAHLHEIAKNEAVVKFVLGRIADIQ | |
| | | KKQGQNGKNQIDRYYETCIGKDKGKSVSEKVDALTKII | |
| | | TGMNYDQFDKKRSVIEDTGRENAEREKFKKIISLYLTV | |
| | | IYHILKNIVNINARYVIGFHCVERDAQLYKEKGYDINL | |
| | | KKLEEKGFSSVTKLCAGIDETAPDKRKDVEKEMAERAK | |
| | | ESIDSLESANPKLYANYIKYSDEKKAEEFTRQINREKA | |
| | | KTALNAYLRNTKWNVIIREDLLRIDNKTCTLFRNKAVH | |
| | | LEVARYVHAYINDIAEVNSYFQLYHYIMQRIIMNERYE | |
| | | KSSGKVSEYFDAVNDEKKYNDRLLKLLCVPFGYCIPRF | |
| | | KNLSIEALFDRNEAAKFDKEKKKVSGNSGSGPKKKRKV | |
| | | AAAYPYDVPDYAASGSGKRTADGSEFES | |
| 472 | LwaCas13 | MKRTADGSEFESPKKKRKVKVTKVDGISHKKYIEEGKL | 1483 |
| | with | VKSTSEENRTSERLSELLSIRLDIYIKNPDNASEEENR | |
| | NLS | IRRENLKKFFSNKVLHLKDSVLYLKNRKEKNAVQDKNY | |
| | | SEEDISEYDLKNKNSFSVLKKILLNEDVNSEELEIFRK | |
| | | DVEAKLNKINSLKYSFEENKANYQKINENNVEKVGGKS | |
| | | KRNIIYDYYRESAKRNDYINNVQEAFDKLYKKEDIEKL | |
| | | FFLIENSKKHEKYKIREYYHKIIGRKNDKENFAKIIYE | |
| | | EIQNVNNIKELIEKIPDMSELKKSQVFYKYYLDKEELN | |
| | | DKNIKYAFCHFVEIEMSQLLKNYVYKRLSNISNDKIKR | |
| | | IFEYQNLKKLIENKLLNKLDTYVRNCGKYNYYLQVGEI | |
| | | ATSDFIARNRQNEAFLRNIIGVSSVAYFSLRNILETEN | |
| | | ENGITGRMRGKTVKNNKGEEKYVSGEVDKIYNENKQNE | |
| | | VKENLKMFYSYDFNMDNKNEIEDFFANIDEAISSIRHG | |
| | | IVHFNLELEGKDIFAFKNIAPSEISKKMFQNEINEKKL | |
| | | KLKIFKQLNSANVENYYEKDVIIKYLKNTKFNFVNKNI | |
| | | PFVPSFTKLYNKIEDLRNTLKFFWSVPKDKEEKDAQIY | |
| | | LLKNIYYGEFLNKFVKNSKVFFKITNEVIKINKQRNQK | |
| | | TGHYKYQKFENIEKTVPVEYLAIIQSREMINNQDKEEK | |
| | | NTYIDFIQQIFLKGFIDYLNKNNLKYIESNNNNDNNDI | |
| | | FSKIKIKKDNKEKYDKILKNYEKHNRNKEIPHEINEFV | |
| | | REIKLGKILKYTENLNMFYLILKLLNHKELTNLKGSLE | |
| | | KYQSANKEETFSDELELINLLNLDNNRVTEDFELEANE | |
| | | IGKFLDFNENKIKDRKELKKFDINKIYFDGENIIKHRA | |
| | | FYNIKKYGMLNLLEKIADKAKYKISLKELKEYSNKKNE | |
| | | IEKNYTMQQNLHRKYARPKKDEKFNDEDYKEYEKAIGN | |
| | | IQKYTHLKNKVEFNELNLLQGLLLKILHRLVGYTSIWE | |
| | | RDLRFRLKGEFPENHYIEEIFNFDNSKNVKYKSGQIVE | |
| | | KYINFYKELYKDNVEKRSIYSDKKVKKLKQEKKDLYIR | |
| | | NYIAHFNYIPHAEISLLEVLENLRKLLSYDRKLKNAIM | |
| | | KSIVDILKEYGFVATFKIGADKKIEIQTLESEKIVHLK | |
| | | NLKKKKLMTDRNSEELCELVKVMFEYKALEGGGGSGGG | |
| | | GSGGGGSVSKGEELFTGVVPILVELDGDVNGHKFSVRG | |
| | | EGEGDATNGKLTLKFICTTGKLPVPWPTLVTTLTYGVQ | |
| | | CFSRYPDHMKQHDFFKSAMPEGYVQERTISFKDDGTYK | |
| | | TRAEVKFEGDTLVNRIELKGIDFKEDGNILGHKLEYNF | |
| | | NSHNVYITADKQKNGIKANFKIRHNVEDGSVQLADHYQ | |
| | | QNTPIGDGPVLLPDNHYLSTQSKLSKDPNEKRDHMVLL | |
| | | EFVTAAGITLGMDELYKGSEGAPKKKRKVGSSYPYDVP | |
| | | DYAYPYDVPDYAYPYDVPDYAKRTADGSEFESPKKKRK | |
| | | V | |
| 473 | PspCas13 | MKRTADGSEFESPKKKRKVNIPALVENQKKYFGTYSVM | 1169 |
| | with | AMLNAQTVLDHIQKVADIEGEQNENNENLWFHPVMSHL | |
| | NLS | YNAKNGYDKQPEKTMFIIERLQSYFPFLKIMAENQREY | |
| | | SNGKYKQNRVEVNSNDIFEVLKRAFGVLKMYRDLTNHY | |
| | | KTYEEKLNDGCEFLTSTEQPLSGMINNYYTVALRNMNE | |
| | | RYGYKTEDLAFIQDKRFKFVKDAYGKKKSQVNTGFFLS | |
| | | LQDYNGDTQKKLHLSGVGIALLICLFLDKQYINIFLSR | |
| | | LPIFSSYNAQSEERRIIIRSFGINSIKLPKDRIHSEKS | |
| | | NKSVAMDMLNEVKRCPDELFTTLSAEKQSRFRIISDDH | |
| | | NEVLMKRSSDRFVPLLLQYIDYGKLFDHIRFHVNMGKL | |
| | | RYLLKADKTCIDGQTRVRVIEQPLNGFGRLEEAETMRK | |
| | | QENGTFGNSGIRIRDFENMKRDDANPANYPYIVDTYTH | |
| | | YILENNKVEMFINDKEDSAPLLPVIEDDRYVVKTIPSC | |
| | | RMSTLEIPAMAFHMFLFGSKKTEKLIVDVHNRYKRLFQ | |
| | | AMQKEEVTAENIASFGIAESDLPQKILDLISGNAHGKD | |
| | | VDAFIRLTVDDMLTDTERRIKRFKDDRKSIRSADNKMG | |
| | | KRGFKQISTGKLADFLAKDIVLFQPSVNDGENKITGLN | |
| | | YRIMQSAIAVYDSGDDYEAKQQFKLMFEKARLIGKGTT | |
| | | EPHPFLYKVFARSIPANAVEFYERYLIERKFYLTGLSN | |
| | | EIKKGNRVDVPFIRRDQNKWKTPAMKTLGRIYSEDLPV | |
| | | ELPRQMFDNEIKSHLKSLPQMEGIDFNNANVTYLIAEY | |
| | | MKRVLDDDFQTFYQWNRNYRYMDMLKGEYDRKGSLQHC | |
| | | FTSVEEREGLWKERASRTERYRKQASNKIRSNRQMRNA | |
| | | SSEEIETILDKRLSNSRNEYQKSEKVIRRYRVQDALLF | |
| | | LLAKKTLTELADFDGERFKLKEIMPDAEKGILSEIMPM | |
| | | SFTFEKGGKKYTITSEGMKLKNYGDFFVLASDKRIGNL | |
| | | LELVGSDIVSKEDIMEEFNKYDQCRPEISSIVFNLEKW | |
| | | AFDTYPELSARVDREEKVDFKSILKILLNNKNINKEQS | |
| | | DILRKIRNAFDHNNYPDKGVVEIKALPEIAMSIKKAFG | |
| | | EYAIMKGSLQLPPLERLTLGSSYPYDVPDYAYPYDVPD | |
| | | YAYPYDVPDYAKRTADGSEFESPKKKRKV | |
| 474 | RfxCas13 | MKRTADGSEFESPKKKRKVSPKKKRKVEASIEKKKSFA | 1041 |
| | with | KGMGVKSTLVSGSKVYMTTFAEGSDARLEKIVEGDSIR | |
| | NLS | SVNEGEAFSAEMADKNAGYKIGNAKFSHPKGYAVVANN | |
| | | PLYTGPVQQDMLGLKETLEKRYFGESADGNDNICIQVI | |
| | | HNILDIEKILAEYITNAAYAVNNISGLDKDIIGFGKFS | |
| | | TVYTYDEFKDPEHHRAAFNNNDKLINAIKAQYDEFDNF | |
| | | LDNPRLGYFGQAFFSKEGRNYIINYGNECYDILALLSG | |
| | | LRHWVVHNNEEESRISRTWLYNLDKNLDNEYISTLNYL | |
| | | YDRITNELTNSFSKNSAANVNYIAETLGINPAEFAEQY | |
| | | FRFSIMKEQKNLGFNITKLREVMLDRKDMSEIRKNHKV | |
| | | FDSIRTKVYTMMDFVIYRYYIEEDAKVAAANKSLPDNE | |
| | | KSLSEKDIFVINLRGSFNDDQKDALYYDEANRIWRKLE | |
| | | NIMHNIKEFRGNKTREYKKKDAPRLPRILPAGRDVSAF | |
| | | SKLMYALTMFLDGKEINDLLTTLINKFDNIQSFLKVMP | |
| | | LIGVNAKFVEEYAFFKDSAKIADELRLIKSFARMGEPI | |
| | | ADARRAMYIDAIRILGTNLSYDELKALADTFSLDENGN | |
| | | KLKKGKHGMRNFIINNVISNKRFHYLIRYGDPAHLHEI | |
| | | AKNEAVVKFVLGRIADIQKKQGQNGKNQIDRYYETCIG | |
| | | KDKGKSVSEKVDALTKIITGMNYDQFDKKRSVIEDTGR | |
| | | ENAEREKFKKIISLYLTVIYHILKNIVNINARYVIGFH | |
| | | CVERDAQLYKEKGYDINLKKLEEKGFSSVTKLCAGIDE | |
| | | TAPDKRKDVEKEMAERAKESIDSLESANPKLYANYIKY | |
| | | SDEKKAEEFTRQINREKAKTALNAYLRNTKWNVIIRED | |
| | | LLRIDNKTCTLFRNKAVHLEVARYVHAYINDIAEVNSY | |
| | | FQLYHYIMQRIIMNERYEKSSGKVSEYFDAVNDEKKYN | |
| | | DRLLKLLCVPFGYCIPRFKNLSIEALFDRNEAAKFDKE | |
| | | KKKVSGNSGSGPKKKRKVAAAYPYDVPDYAASGSGKRT | |
| | | ADGSEFESPKKKRKV | |
| 475 | SMALL | MKRTADGSEFESPKKKRKVTTTMKISIEFLEPFRMTKW | 1326 |
| | CAS | QESTRRNKNNKEFVRGQAFARWHRNKKDNTKGRPYITG | |
| | Cas711S_ | TLLRSAVIRSAENLLTLSDGKISEKTCCPGKFDTEDKD | |
| | D1580R | RLLQLRQRSTLRWTDKNPCPDNAETYCPFCELLGRSGN | |
| | | DGKKAEKKDWRFRIHFGNLSLPGKPDFDGPKAIGSQRV | |
| | | LNRVDFKSGKAHDFFKAYEVDHTRFPRFEGEITIDNKV | |
| | | SAEARKLLCDSLKFTDRLCGALCVIRFDEYTPAADSGK | |
| | | QTENVQAEPNANLAEKTAEQIISILDDNKKTEYTRLLA | |
| | | DAIRSLRRSSKLVAGLPKDHDGKDDHYLWDIGKKKKDE | |
| | | NSVTIRQILTTSADTKELKNAGKWREFCEKLGEALYLK | |
| | | SKDMSGGLKITRRILGDAEFHGKPDRLEKSRSVSIGSV | |
| | | LKETVVCGELVAKTPFFFGAIDEDAKQTDLQVLLTPDN | |
| | | KYRLPRSAVRGILRRDLQTYFDSPCNAELGGRPCMCKT | |
| | | CRIMRGITVMDARSEYNAPPEIRHRTRINPFTGTVAEG | |
| | | ALFNMEVAPEGIVFPFQLRYRGSEDGLPDALKTVLKWW | |
| | | AEGQAFMSGAASTGKGRFRMENAKYETLDLSDENQRND | |
| | | YLKNWGWRDEKGLEELKKRLNSGLPEPGNYRDPKWHEI | |
| | | NVSIEMASPFINGDPIRAAVDKRGTDVVTFVKYKAEGE | |
| | | EAKPVCAYKAESFRGVIRSAVARIHMEDGVPLTELTHS | |
| | | DCECLLCQIFGSEYEAGKIRFEDLVFESDPEPVTFDHV | |
| | | AIDRFTGGAADKKKFDDSPLPGSPARPLMLKGSFWIRR | |
| | | DVLEDEEYCKALGKALADVNNGLYPLGGKSAIGYGQVK | |
| | | SLGIKGDDKRISRLMNPAFDETDVAVPEKPKTDAEVRI | |
| | | EAEKVYYPHYFVEPHKKVEREEKPCGHQKFHEGRLTGK | |
| | | IRCKLITKTPLIVPDTSNDDFFRPADKEARKEKDEYHK | |
| | | SYAFFRLHKQIMIPGSELRGMVSSVYETVTNSCFRIFD | |
| | | ETKRLSWRGGGSRTVDDRMIGKRMSADLRPCHGDWVED | |
| | | GDLSALNAYPEKRLLLRHPKGLCPACRLFGTGSYKGRV | |
| | | RFGFASLENDPEWLIPGKNPGDPFHGGPVMLSLLERPR | |
| | | PTWSIPGSDNKFKVPGRKFYVHHHAWKTIKDGNHPTTG | |
| | | KAIEQSPNNRTVEALAGGNSFSFEIAFENLKEWELGLL | |
| | | IHSLQLEKGLAHKLGMAKSMGFGSVEIDVESVRLRKDW | |
| | | KQWRNGNSEIPNWLGKGFAKLKEWFRDELDFIENLKKL | |
| | | LWFPEGDQAPRVCYPMLRKKDDPNGNSGYEELKRGEFK | |
| | | KEDRQKKLTTPWTPWAKRTADGSEFESPKKKRKV | |
| 476 | D1580R | MKRTADGSEFESPKKKRKVTTTMKISIEFLEPFRMTKW | 1637 |
| | | QESTRRNKNNKEFVRGQAFARWHRNKKDNTKGRPYITG | |
| | | TLLRSAVIRSAENLLTLSDGKISEKTCCPGKFDTEDKD | |
| | | RLLQLRQRSTLRWTDKNPCPDNAETYCPFCELLGRSGN | |
| | | DGKKAEKKDWRFRIHFGNLSLPGKPDFDGPKAIGSQRV | |
| | | LNRVDFKSGKAHDFFKAYEVDHTRFPRFEGEITIDNKV | |
| | | SAEARKLLCDSLKFTDRLCGALCVIRFDEYTPAADSGK | |
| | | QTENVQAEPNANLAEKTAEQIISILDDNKKTEYTRLLA | |
| | | DAIRSLRRSSKLVAGLPKDHDGKDDHYLWDIGKKKKDE | |
| | | NSVTIRQILTTSADTKELKNAGKWREFCEKLGEALYLK | |
| | | SKDMSGGLKITRRILGDAEFHGKPDRLEKSRSVSIGSV | |
| | | LKETVVCGELVAKTPFFFGAIDEDAKQTDLQVLLTPDN | |
| | | KYRLPRSAVRGILRRDLQTYFDSPCNAELGGRPCMCKT | |
| | | CRIMRGITVMDARSEYNAPPEIRHRTRINPFTGTVAEG | |
| | | ALFNMEVAPEGIVFPFQLRYRGSEDGLPDALKTVLKWW | |
| | | AEGQAFMSGAASTGKGRFRMENAKYETLDLSDENQRND | |
| | | YLKNWGWRDEKGLEELKKRLNSGLPEPGNYRDPKWHEI | |
| | | NVSIEMASPFINGDPIRAAVDKRGTDVVTFVKYKAEGE | |
| | | EAKPVCAYKAESFRGVIRSAVARIHMEDGVPLTELTHS | |
| | | DCECLLCQIFGSEYEAGKIRFEDLVFESDPEPVTFDHV | |
| | | AIDRFTGGAADKKKFDDSPLPGSPARPLMLKGSFWIRR | |
| | | DVLEDEEYCKALGKALADVNNGLYPLGGKSAIGYGQVK | |
| | | SLGIKGDDKRISRLMNPAFDETDVAVPEKPKTDAEVRI | |
| | | EAEKVYYPHYFVEPHKKVEREEKPCGHQKFHEGRLTGK | |
| | | IRCKLITKTPLIVPDTSNDDFFRPADKEARKEKDEYHK | |
| | | SYAFFRLHKQIMIPGSELRGMVSSVYETVTNSCFRIFD | |
| | | ETKRLSWRMDADHQNVLQDFLPGRVTADGKHIQKFSET | |
| | | ARVPFYDKTQKHFDILDEQEIAGEKPVRMWVKRFIKRL | |
| | | SLVDPAKHPQKKQDNKWKRRKEGIATFIEQKNGSYYFN | |
| | | VVTNNGCTSFHLWHKPDNFDQEKLEGIQNGEKLDCWVR | |
| | | DSRYQKAFQEIPENDPDGWECKEGYLHVVGPSKVEFSD | |
| | | KKGDVINNFQGTLPSVPNDWKTIRTNDFKNRKRKNEPV | |
| | | FCCEDDKGNYYTMAKYCETFFFDLKENEEYEIPEKARI | |
| | | KYKELLRVYNNNPQAVPESVFQSRVARENVEKLKSGDL | |
| | | VYFKHNEKYVEDIVPVRISRTVDDRMIGKRMSADLRPC | |
| | | HGDWVEDGDLSALNAYPEKRLLLRHPKGLCPACRLFGT | |
| | | GSYKGRVRFGFASLENDPEWLIPGKNPGDPFHGGPVML | |
| | | SLLERPRPTWSIPGSDNKFKVPGRKFYVHHHAWKTIKD | |
| | | GNHPTTGKAIEQSPNNRTVEALAGGNSFSFEIAFENLK | |
| | | EWELGLLIHSLQLEKGLAHKLGMAKSMGFGSVEIDVES | |
| | | VRLRKDWKQWRNGNSEIPNWLGKGFAKLKEWFRDELDF | |
| | | IENLKKLLWFPEGDQAPRVCYPMLRKKDDPNGNSGYEE | |
| | | LKRGEFKKEDRQKKLTTPWTPWAKRTADGSEFESPKKK | |
| | | RKV | |
| 477 | Doublemut | MKRTADGSEFESPKKKRKVTTTMKISIEFLEPFRMTKW | 1637 |
| | 6 | QESTRRNKNNKEFVRGQAFARWHRNKKDNTKGRPYITG | |
| | | TLLRSAVIRSAENLLTLSDGKISEKTCCPGKFDTEDKD | |
| | | RLLQLRQRSTLRWTDKNPCPDNAETYCPFCELLGRSGN | |
| | | DGKKAEKKDWRFRIHFGNLSLPGKPDFDGPKAIGSQRV | |
| | | LNRVDFKSGKAHDFFKAYEVDHTRFPRFEGEITIDNKV | |
| | | SAEARKLLCDSLKFTDRLCGALCVIRFDEYTPAADSGK | |
| | | QTENVQAEPNANLAEKTAEQIISILDDNKKTEYTRLLA | |
| | | DAIRSLRRSSKLVAGLPKDHDGKDDHYLWDIGKKKKDE | |
| | | NSVTIRQILTTSADTKELKNAGKWREFCEKLGEALYLK | |
| | | SKDMSGGLKITRRILGDAEFHGKPDRLEKSRSVSIGSV | |
| | | LKETVVCGELVAKTPFFFGAIDEDAKQTDLQVLLTPDN | |
| | | KYRLPRSAVRGILRRDLQTYFDSPCNAELGGRPCMCKT | |
| | | CRIMRGITVMDARSEYNAPPEIRHRTRINPFTGTVAEG | |
| | | ALFNMEVAPEGIVFPFQLRYRGSEDGLPDALKTVLKWW | |
| | | AEGQAFMSGAASTGKGRFRMENAKYETLDLSDENQRND | |
| | | YLKNWGWRDEKGLEELKKRLNSGLPEPGNYRDPKWHEI | |
| | | NVSIEMASPFINGDPIRAAVDKRGTDVVTFVKYKAEGE | |
| | | EAKPVCAYKAESFRGVIRSAVARIHMEDGVPLTELTHS | |
| | | DCECLLCQIFGSEYEAGKIRFEDLVFESDPEPVTFDHV | |
| | | AIDRFTGGAADKKKFDDSPLPGSPARPLMLKGSFWIRR | |
| | | DVLEDEEYCKALGKALADVNNGLYPLGGKSAIGYGQVK | |
| | | SLGIKGDDKRISRLMNPAFDETDVAVPEKPKTDAEVRI | |
| | | EAEKVYYPHYFVEPHKKVEREEKPCGHQKFHEGRLTGK | |
| | | IRCKLITKTPLIVPDTSNDDFFRPADKEARKEKDEYHK | |
| | | SYAFFRLHKQIMIPGSELRGMVSSVYETVTNSCFRIFD | |
| | | ETKRLSWRMDADHQNVLQKFLPGRVTADGKHIQKFSET | |
| | | ARVPFYDKTQKHFDILDEQEIAGEKPVRMWVKRFIKRL | |
| | | SLVDPAKHPQKKQDNKWKRRKEGIATFIEQKNGSYYFN | |
| | | VVTNNGCTSFHLWHKPDNFDQEKLEGIQNGEKLDCWVR | |
| | | DSRYQKAFQEIPENDPDGWECKEGYLHVVGPSKVEFSD | |
| | | KKGDVINNFQGTLPSVPNDWKTIRTNDFKNRKRKNEPV | |
| | | FCCEDDKGNYYTMAKYCETFFFDLKENEEYEIPEKARI | |
| | | KYKELLRVYNNNPQAVPESVFQSRVARENVEKLKSGDL | |
| | | VYFKHNEKYVEDIVPVRISRTVDDRMIGKRMSADLRPC | |
| | | HGDWVEDGDLSALNAYPEKRLLLRHPKGLCPACRLFGT | |
| | | GSYKGRVRFGFASLENDPEWLIPGKNPGDPFHGGPVML | |
| | | SLLERPRPTWSIPGSDNKFKVPGRKFYVHHHAWKTIKD | |
| | | GNHPTTGKAIEQSPNNRTVEALAGGNSFSFEIAFENLK | |
| | | EWELGLLIHSLQLEKGLAHKLGMAKSMGFGSVEIDVES | |
| | | VRLRKDWKQWRNGNSEIPNWLGKGFAKLKEWFRDELDF | |
| | | IENLKKLLWFPEGDQAPRVCYPMLRKKDDPNGNSGYEE | |
| | | LKRGEFKKEDRQKKLTTPWTPWAKRTADGSEFESPKKK | |
| | | RKV | |
| 478 | Triplemut | MKRTADGSEFESPKKKRKVTTTMKISIEFLEPFRMTKW | 1637 |
| | 4 | QESTRRNKNNKEFVRGQAFARWHRNKKDNTKGRPYITG | |
| | | TLLRSAVIRSAENLLTLSDGKISEKTCCPGKFDTEDKD | |
| | | RLLQLRQRSTLRWTDKNPCPDNAETYCPFCELLGRSGN | |
| | | DGKKAEKKDWRFRIHFGNLSLPGKPDFDGPKAIGSQRV | |
| | | LNRVDFKSGKAHDFFKAYEVDHTRFPRFEGEITIDNKV | |
| | | SAEARKLLCDSLKFTDRLCGALCVIRFDEYTPAADSGK | |
| | | QTENVQAEPNANLAEKTAEQIISILDDNKKTEYTRLLA | |
| | | DAIRSLRRSSKLVAGLPKDHDGKDDHYLWDIGKKKKDE | |
| | | NSVTIRQILTTSADTKELKNAGKWREFCEKLGEALYLK | |
| | | SKDMSGGLKITRRILGDAEFHGKPDRLEKSRSVSIGSV | |
| | | LKETVVCGELVAKTPFFFGAIDEDAKQTDLQVLLTPDN | |
| | | KYRLPRSAVRGILRRDLQTYFDSPCNAELGGRPCMCKT | |
| | | CRIMRGITVMDARSEYNAPPEIRHRTRINPFTGTVAEG | |
| | | ALFNMEVAPEGIVFPFQLRYRGSEDGLPDALKTVLKWW | |
| | | AEGQAFMSGAASTGKGRFRMENAKYETLDLSDENQRND | |
| | | YLKNWGWRDEKGLEELKKRLNSGLPEPGNYRDPKWHEI | |
| | | NVSIEMASPFINGDPIRAAVDKRGTDVVTFVKYKAEGE | |
| | | EAKPVCAYKAESFRGVIRSAVARIHMEDGVPLTELTHS | |
| | | DCECLLCQIFGSEYEAGKIRFEDLVFESDPEPVTFDHV | |
| | | AIDRFTGGAADKKKFDDSPLPGSPARPLMLKGSFWIRR | |
| | | DVLEDEEYCKALGKALADVNNGLYPLGGKSAIGYGQVK | |
| | | SLGIKGDDKRISRLMNPAFDETDVAVPEKPKTDAEVRI | |
| | | EAEKVYYPHYFVEPHKKVEREEKPCGHQKFHEGRLTGK | |
| | | IRCKLITKTPLIVPDTSNDDFFRPADKEARKEKDEYHK | |
| | | SYAFFRLHKQIMIPGSELRGMVSSVYETVTNSCFRIFD | |
| | | ETKRLSWRMDAKHQNVLQKFLPGRVTADGKHIQKFSET | |
| | | ARVPFYDKTQKHFDILDEQEIAGEKPVRMWVKRFIKRL | |
| | | SLVDPAKHPQKKQDNKWKRRKEGIATFIEQKNGSYYFN | |
| | | VVTNNGCTSFHLWHKPDNFDQEKLEGIQNGEKLDCWVR | |
| | | DSRYQKAFQEIPENDPDGWECKEGYLHVVGPSKVEFSD | |
| | | KKGDVINNFQGTLPSVPNDWKTIRTNDFKNRKRKNEPV | |
| | | FCCEDDKGNYYTMAKYCETFFFDLKENEEYEIPEKARI | |
| | | KYKELLRVYNNNPQAVPESVFQSRVARENVEKLKSGDL | |
| | | VYFKHNEKYVEDIVPVRISRTVDDRMIGKRMSADLRPC | |
| | | HGDWVEDGDLSALNAYPEKRLLLRHPKGLCPACRLFGT | |
| | | GSYKGRVRFGFASLENDPEWLIPGKNPGDPFHGGPVML | |
| | | SLLERPRPTWSIPGSDNKFKVPGRKFYVHHHAWKTIKD | |
| | | GNHPTTGKAIEQSPNNRTVEALAGGNSFSFEIAFENLK | |
| | | EWELGLLIHSLQLEKGLAHKLGMAKSMGFGSVEIDVES | |
| | | VRLRKDWKQWRNGNSEIPNWLGKGFAKLKEWFRDELDF | |
| | | IENLKKLLWFPEGDQAPRVCYPMLRKKDDPNGNSGYEE | |
| | | LKRGEFKKEDRQKKLTTPWTPWAKRTADGSEFESPKKK | |
| | | RKV | |
| 479 | Quadruplemut | MKRTADGSEFESPKKKRKVTTTMKISIEFLEPFRMTKW | 1637 |
| | 3 | QESTRRNKNNKEFVRGQAFARWHRNKKDNTKGRPYITG | |
| | | TLLRSAVIRSAENLLTLSDGKISEKTCCPGKFDTEDKD | |
| | | RLLQLRQRSTLRWTDKNPCPDNAETYCPFCELLGRSGN | |
| | | DGKKAEKKDWRFRIHFGNLSLPGKPDFDGPKAIGSQRV | |
| | | LNRVDFKSGKAHDFFKAYEVDHTRFPRFEGEITIDNKV | |
| | | SAEARKLLCDSLKFTDRLCGALCVIRFDEYTPAADSGK | |
| | | QTENVQAEPNANLAEKTAEQIISILDDNKKTEYTRLLA | |
| | | DAIRSLRRSSKLVAGLPKDHDGKDDHKLWDIGKKKKDE | |
| | | NSVTIRQILTTSADTKELKNAGKWREFCEKLGEALYLK | |
| | | SKDMSGGLKITRRILGDAEFHGKPDRLEKSRSVSIGSV | |
| | | LKETVVCGELVAKTPFFFGAIDEDAKQTDLQVLLTPDN | |
| | | KYRLPRSAVRGILRRDLQTYFDSPCNAELGGRPCMCKT | |
| | | CRIMRGITVMDARSEYNAPPEIRHRTRINPFTGTVAEG | |
| | | ALFNMEVAPEGIVFPFQLRYRGSEDGLPDALKTVLKWW | |
| | | AEGQAFMSGAASTGKGRFRMENAKYETLDLSDENQRND | |
| | | YLKNWGWRDEKGLEELKKRLNSGLPEPGNYRDPKWHEI | |
| | | NVSIEMASPFINGDPIRAAVDKRGTDVVTFVKYKAEGE | |
| | | EAKPVCAYKAESFRGVIRSAVARIHMEDGVPLTELTHS | |
| | | DCECLLCQIFGSEYEAGKIRFEDLVFESDPEPVTFDHV | |
| | | AIDRFTGGAADKKKFDDSPLPGSPARPLMLKGSFWIRR | |
| | | DVLEDEEYCKALGKALADVNNGLYPLGGKSAIGYGQVK | |
| | | SLGIKGDDKRISRLMNPAFDETDVAVPEKPKTDAEVRI | |
| | | EAEKVYYPHYFVEPHKKVEREEKPCGHQKFHEGRLTGK | |
| | | IRCKLITKTPLIVPDTSNDDFFRPADKEARKEKDEYHK | |
| | | SYAFFRLHKQIMIPGSELRGMVSSVYETVTNSCFRIFD | |
| | | ETKRLSWRMDAKHQNVLQKFLPGRVTADGKHIQKFSET | |
| | | ARVPFYDKTQKHFDILDEQEIAGEKPVRMWVKRFIKRL | |
| | | SLVDPAKHPQKKQDNKWKRRKEGIATFIEQKNGSYYFN | |
| | | VVTNNGCTSFHLWHKPDNFDQEKLEGIQNGEKLDCWVR | |
| | | DSRYQKAFQEIPENDPDGWECKEGYLHVVGPSKVEFSD | |
| | | KKGDVINNFQGTLPSVPNDWKTIRTNDFKNRKRKNEPV | |
| | | FCCEDDKGNYYTMAKYCETFFFDLKENEEYEIPEKARI | |
| | | KYKELLRVYNNNPQAVPESVFQSRVARENVEKLKSGDL | |
| | | VYFKHNEKYVEDIVPVRISRTVDDRMIGKRMSADLRPC | |
| | | HGDWVEDGDLSALNAYPEKRLLLRHPKGLCPACRLFGT | |
| | | GSYKGRVRFGFASLENDPEWLIPGKNPGDPFHGGPVML | |
| | | SLLERPRPTWSIPGSDNKFKVPGRKFYVHHHAWKTIKD | |
| | | GNHPTTGKAIEQSPNNRTVEALAGGNSFSFEIAFENLK | |
| | | EWELGLLIHSLQLEKGLAHKLGMAKSMGFGSVEIDVES | |
| | | VRLRKDWKQWRNGNSEIPNWLGKGFAKLKEWFRDELDF | |
| | | IENLKKLLWFPEGDQAPRVCYPMLRKKDDPNGNSGYEE | |
| | | LKRGEFKKEDRQKKLTTPWTPWAKRTADGSEFESPKKK | |
| | | RKV | |
| 480 | Y280K- | MKRTADGSEFESPKKKRKVTTTMKISIEFLEPFRMTKW | 1354 |
| | D1580R- | QESTRRNKNNKEFVRGQAFARWHRNKKDNTKGRPYITG | |
| | Cas711S | TLLRSAVIRSAENLLTLSDGKISEKTCCPGKFDTEDKD | |
| | | RLLQLRQRSTLRWTDKNPCPDNAETYCPFCELLGRSGN | |
| | | DGKKAEKKDWRFRIHFGNLSLPGKPDFDGPKAIGSQRV | |
| | | LNRVDFKSGKAHDFFKAYEVDHTRFPRFEGEITIDNKV | |
| | | SAEARKLLCDSLKFTDRLCGALCVIRFDEYTPAADSGK | |
| | | QTENVQAEPNANLAEKTAEQIISILDDNKKTEKTRLLA | |
| | | DAIRSLRRSSKLVAGLPKDHDGKDDHYLWDIGKKKKDE | |
| | | NSVTIRQILTTSADTKELKNAGKWREFCEKLGEALYLK | |
| | | SKDMSGGLKITRRILGDAEFHGKPDRLEKSRSVSIGSV | |
| | | LKETVVCGELVAKTPFFFGAIDEDAKQTDLQVLLTPDN | |
| | | KYRLPRSAVRGILRRDLQTYFDSPCNAELGGRPCMCKT | |
| | | CRIMRGITVMDARSEYNAPPEIRHRTRINPFTGTVAEG | |
| | | ALFNMEVAPEGIVFPFQLRYRGSEDGLPDALKTVLKWW | |
| | | AEGQAFMSGAASTGKGRFRMENAKYETLDLSDENQRND | |
| | | YLKNWGWRDEKGLEELKKRLNSGLPEPGNYRDPKWHEI | |
| | | NVSIEMASPFINGDPIRAAVDKRGTDVVTFVKYKAEGE | |
| | | EAKPVCAYKAESFRGVIRSAVARIHMEDGVPLTELTHS | |
| | | DCECLLCQIFGSEYEAGKIRFEDLVFESDPEPVTFDHV | |
| | | AIDRFTGGAADKKKFDDSPLPGSPARPLMLKGSFWIRR | |
| | | DVLEDEEYCKALGKALADVNNGLYPLGGKSAIGYGQVK | |
| | | SLGIKGDDKRISRLMNPAFDETDVAVPEKPKTDAEVRI | |
| | | EAEKVYYPHYFVEPHKKVEREEKPCGHQKFHEGRLTGK | |
| | | IRCKLITKTPLIVPDTSNDDFFRPADKEARKEKDEYHK | |
| | | SYAFFRLHKQIMIPGSELRGMVSSVYETVTNSCFRIFD | |
| | | ETKRLSWRMDADHQNVLQDFLPGRVTADGKHIQKESGG | |
| | | GSRTVDDRMIGKRMSADLRPCHGDWVEDGDLSALNAYP | |
| | | EKRLLLRHPKGLCPACRLFGTGSYKGRVRFGFASLEND | |
| | | PEWLIPGKNPGDPFHGGPVMLSLLERPRPTWSIPGSDN | |
| | | KFKVPGRKFYVHHHAWKTIKDGNHPTTGKAIEQSPNNR | |
| | | TVEALAGGNSFSFEIAFENLKEWELGLLIHSLQLEKGL | |
| | | AHKLGMAKSMGFGSVEIDVESVRLRKDWKQWRNGNSEI | |
| | | PNWLGKGFAKLKEWFRDELDFIENLKKLLWFPEGDQAP | |
| | | RVCYPMLRKKDDPNGNSGYEELKRGEFKKEDRQKKLTT | |
| | | PWTPWAKRTADGSEFESPKKKRKV | |
| 481 | E279R- | MKRTADGSEFESPKKKRKVTTTMKISIEFLEPFRMTKW | 1354 |
| | D1580R- | QESTRRNKNNKEFVRGQAFARWHRNKKDNTKGRPYITG | |
| | Cas711S | TLLRSAVIRSAENLLTLSDGKISEKTCCPGKFDTEDKD | |
| | | RLLQLRQRSTLRWTDKNPCPDNAETYCPFCELLGRSGN | |
| | | DGKKAEKKDWRFRIHFGNLSLPGKPDFDGPKAIGSQRV | |
| | | LNRVDFKSGKAHDFFKAYEVDHTRFPRFEGEITIDNKV | |
| | | SAEARKLLCDSLKFTDRLCGALCVIRFDEYTPAADSGK | |
| | | QTENVQAEPNANLAEKTAEQIISILDDNKKTRYTRLLA | |
| | | DAIRSLRRSSKLVAGLPKDHDGKDDHYLWDIGKKKKDE | |
| | | NSVTIRQILTTSADTKELKNAGKWREFCEKLGEALYLK | |
| | | SKDMSGGLKITRRILGDAEFHGKPDRLEKSRSVSIGSV | |
| | | LKETVVCGELVAKTPFFFGAIDEDAKQTDLQVLLTPDN | |
| | | KYRLPRSAVRGILRRDLQTYFDSPCNAELGGRPCMCKT | |
| | | CRIMRGITVMDARSEYNAPPEIRHRTRINPFTGTVAEG | |
| | | ALFNMEVAPEGIVFPFQLRYRGSEDGLPDALKTVLKWW | |
| | | AEGQAFMSGAASTGKGRFRMENAKYETLDLSDENQRND | |
| | | YLKNWGWRDEKGLEELKKRLNSGLPEPGNYRDPKWHEI | |
| | | NVSIEMASPFINGDPIRAAVDKRGTDVVTFVKYKAEGE | |
| | | EAKPVCAYKAESFRGVIRSAVARIHMEDGVPLTELTHS | |
| | | DCECLLCQIFGSEYEAGKIRFEDLVFESDPEPVTFDHV | |
| | | AIDRFTGGAADKKKFDDSPLPGSPARPLMLKGSFWIRR | |
| | | DVLEDEEYCKALGKALADVNNGLYPLGGKSAIGYGQVK | |
| | | SLGIKGDDKRISRLMNPAFDETDVAVPEKPKTDAEVRI | |
| | | EAEKVYYPHYFVEPHKKVEREEKPCGHQKFHEGRLTGK | |
| | | IRCKLITKTPLIVPDTSNDDFFRPADKEARKEKDEYHK | |
| | | SYAFFRLHKQIMIPGSELRGMVSSVYETVTNSCFRIFD | |
| | | ETKRLSWRMDADHQNVLQDFLPGRVTADGKHIQKFSGG | |
| | | GSRTVDDRMIGKRMSADLRPCHGDWVEDGDLSALNAYP | |
| | | EKRLLLRHPKGLCPACRLFGTGSYKGRVRFGFASLEND | |
| | | PEWLIPGKNPGDPFHGGPVMLSLLERPRPTWSIPGSDN | |
| | | KFKVPGRKFYVHHHAWKTIKDGNHPTTGKAIEQSPNNR | |
| | | TVEALAGGNSFSFEIAFENLKEWELGLLIHSLQLEKGL | |
| | | AHKLGMAKSMGFGSVEIDVESVRLRKDWKQWRNGNSEI | |
| | | PNWLGKGFAKLKEWFRDELDFIENLKKLLWFPEGDQAP | |
| | | RVCYPMLRKKDDPNGNSGYEELKRGEFKKEDRQKKLTT | |
| | | PWTPWAKRTADGSEFESPKKKRKV | |
| 466 | NewSmallCas- | MKRTADGSEFESPKKKRKVTTTMKISIEFLEPFRMTKW | 1354 |
| | S1006- | QESTRRNKNNKEFVRGQAFARWHRNKKDNTKGRPYITG | |
| | R1294- | TLLRSAVIRSAENLLTLSDGKISEKTCCPGKFDTEDKD | |
| | Cas711S | RLLQLRQRSTLRWTDKNPCPDNAETYCPFCELLGRSGN | |
| | | DGKKAEKKDWRFRIHFGNLSLPGKPDFDGPKAIGSQRV | |
| | | LNRVDFKSGKAHDFFKAYEVDHTRFPRFEGEITIDNKV | |
| | | SAEARKLLCDSLKFTDRLCGALCVIRFDEYTPAADSGK | |
| | | QTENVQAEPNANLAEKTAEQIISILDDNKKTEYTRLLA | |
| | | DAIRSLRRSSKLVAGLPKDHDGKDDHYLWDIGKKKKDE | |
| | | NSVTIRQILTTSADTKELKNAGKWREFCEKLGEALYLK | |
| | | SKDMSGGLKITRRILGDAEFHGKPDRLEKSRSVSIGSV | |
| | | LKETVVCGELVAKTPFFFGAIDEDAKQTDLQVLLTPDN | |
| | | KYRLPRSAVRGILRRDLQTYFDSPCNAELGGRPCMCKT | |
| | | CRIMRGITVMDARSEYNAPPEIRHRTRINPFTGTVAEG | |
| | | ALFNMEVAPEGIVFPFQLRYRGSEDGLPDALKTVLKWW | |
| | | AEGQAFMSGAASTGKGRFRMENAKYETLDLSDENQRND | |
| | | YLKNWGWRDEKGLEELKKRLNSGLPEPGNYRDPKWHEI | |
| | | NVSIEMASPFINGDPIRAAVDKRGTDVVTFVKYKAEGE | |
| | | EAKPVCAYKAESFRGVIRSAVARIHMEDGVPLTELTHS | |
| | | DCECLLCQIFGSEYEAGKIRFEDLVFESDPEPVTFDHV | |
| | | AIDRFTGGAADKKKFDDSPLPGSPARPLMLKGSFWIRR | |
| | | DVLEDEEYCKALGKALADVNNGLYPLGGKSAIGYGQVK | |
| | | SLGIKGDDKRISRLMNPAFDETDVAVPEKPKTDAEVRI | |
| | | EAEKVYYPHYFVEPHKKVEREEKPCGHQKFHEGRLTGK | |
| | | IRCKLITKTPLIVPDTSNDDFFRPADKEARKEKDEYHK | |
| | | SYAFFRLHKQIMIPGSELRGMVSSVYETVTNSCFRIFD | |
| | | ETKRLSWRMDADHQNVLQDFLPGRVTADGKHIQKESGG | |
| | | GSRTVDDRMIGKRMSADLRPCHGDWVEDGDLSALNAYP | |
| | | EKRLLLRHPKGLCPACRLFGTGSYKGRVRFGFASLEND | |
| | | PEWLIPGKNPGDPFHGGPVMLSLLERPRPTWSIPGSDN | |
| | | KFKVPGRKFYVHHHAWKTIKDGNHPTTGKAIEQSPNNR | |
| | | TVEALAGGNSFSFEIAFENLKEWELGLLIHSLQLEKGL | |
| | | AHKLGMAKSMGFGSVEIDVESVRLRKDWKQWRNGNSEI | |
| | | PNWLGKGFAKLKEWFRDELDFIENLKKLLWFPEGDQAP | |
| | | RVCYPMLRKKDDPNGNSGYEELKDGEFKKEDRQKKLTT | |
| | | PWTPWAKRTADGSEFESPKKKRKV | |
| 482 | NewSmallCas- | MKRTADGSEFESPKKKRKVTTTMKISIEFLEPFRMTKW | 1354 |
| | S1006- | QESTRRNKNNKEFVRGQAFARWHRNKKDNTKGRPYITG | |
| | R1294- | TLLRSAVIRSAENLLTLSDGKISEKTCCPGKFDTEDKD | |
| | Cas711S- | RLLQLRQRSTLRWTDKNPCPDNAETYCPFCELLGRSGN | |
| | D1580R- | DGKKAEKKDWRFRIHFGNLSLPGKPDFDGPKAIGSQRV | |
| | D988K | LNRVDFKSGKAHDFFKAYEVDHTRFPRFEGEITIDNKV | |
| | | SAEARKLLCDSLKFTDRLCGALCVIRFDEYTPAADSGK | |
| | | QTENVQAEPNANLAEKTAEQIISILDDNKKTEYTRLLA | |
| | | DAIRSLRRSSKLVAGLPKDHDGKDDHYLWDIGKKKKDE | |
| | | NSVTIRQILTTSADTKELKNAGKWREFCEKLGEALYLK | |
| | | SKDMSGGLKITRRILGDAEFHGKPDRLEKSRSVSIGSV | |
| | | LKETVVCGELVAKTPFFFGAIDEDAKQTDLQVLLTPDN | |
| | | KYRLPRSAVRGILRRDLQTYFDSPCNAELGGRPCMCKT | |
| | | CRIMRGITVMDARSEYNAPPEIRHRTRINPFTGTVAEG | |
| | | ALFNMEVAPEGIVFPFQLRYRGSEDGLPDALKTVLKWW | |
| | | AEGQAFMSGAASTGKGRFRMENAKYETLDLSDENQRND | |
| | | YLKNWGWRDEKGLEELKKRLNSGLPEPGNYRDPKWHEI | |
| | | NVSIEMASPFINGDPIRAAVDKRGTDVVTFVKYKAEGE | |
| | | EAKPVCAYKAESFRGVIRSAVARIHMEDGVPLTELTHS | |
| | | DCECLLCQIFGSEYEAGKIRFEDLVFESDPEPVTFDHV | |
| | | AIDRFTGGAADKKKFDDSPLPGSPARPLMLKGSFWIRR | |
| | | DVLEDEEYCKALGKALADVNNGLYPLGGKSAIGYGQVK | |
| | | SLGIKGDDKRISRLMNPAFDETDVAVPEKPKTDAEVRI | |
| | | EAEKVYYPHYFVEPHKKVEREEKPCGHQKFHEGRLTGK | |
| | | IRCKLITKTPLIVPDTSNDDFFRPADKEARKEKDEYHK | |
| | | SYAFFRLHKQIMIPGSELRGMVSSVYETVTNSCFRIFD | |
| | | ETKRLSWRMDADHQNVLQKFLPGRVTADGKHIQKFSGG | |
| | | GSRTVDDRMIGKRMSADLRPCHGDWVEDGDLSALNAYP | |
| | | EKRLLLRHPKGLCPACRLFGTGSYKGRVRFGFASLEND | |
| | | PEWLIPGKNPGDPFHGGPVMLSLLERPRPTWSIPGSDN | |
| | | KFKVPGRKFYVHHHAWKTIKDGNHPTTGKAIEQSPNNR | |
| | | TVEALAGGNSFSFEIAFENLKEWELGLLIHSLQLEKGL | |
| | | AHKLGMAKSMGFGSVEIDVESVRLRKDWKQWRNGNSEI | |
| | | PNWLGKGFAKLKEWFRDELDFIENLKKLLWFPEGDQAP | |
| | | RVCYPMLRKKDDPNGNSGYEELKRGEFKKEDRQKKLTT | |
| | | PWTPWAKRTADGSEFESPKKKRKV | |
| 483 | NewSmallCas- | MKRTADGSEFESPKKKRKVTTTMKISIEFLEPFRMTKW | 1354 |
| | S1006- | QESTRRNKNNKEFVRGQAFARWHRNKKDNTKGRPYITG | |
| | R1294- | TLLRSAVIRSAENLLTLSDGKISEKTCCPGKFDTEDKD | |
| | Cas711S- | RLLQLRQRSTLRWTDKNPCPDNAETYCPFCELLGRSGN | |
| | D1580R- | DGKKAEKKDWRFRIHFGNLSLPGKPDFDGPKAIGSQRV | |
| | D988K- | LNRVDFKSGKAHDFFKAYEVDHTRFPRFEGEITIDNKV | |
| | D981K | SAEARKLLCDSLKFTDRLCGALCVIRFDEYTPAADSGK | |
| | | QTENVQAEPNANLAEKTAEQIISILDDNKKTEYTRLLA | |
| | | DAIRSLRRSSKLVAGLPKDHDGKDDHYLWDIGKKKKDE | |
| | | NSVTIRQILTTSADTKELKNAGKWREFCEKLGEALYLK | |
| | | SKDMSGGLKITRRILGDAEFHGKPDRLEKSRSVSIGSV | |
| | | LKETVVCGELVAKTPFFFGAIDEDAKQTDLQVLLTPDN | |
| | | KYRLPRSAVRGILRRDLQTYFDSPCNAELGGRPCMCKT | |
| | | CRIMRGITVMDARSEYNAPPEIRHRTRINPFTGTVAEG | |
| | | ALFNMEVAPEGIVFPFQLRYRGSEDGLPDALKTVLKWW | |
| | | AEGQAFMSGAASTGKGRFRMENAKYETLDLSDENQRND | |
| | | YLKNWGWRDEKGLEELKKRLNSGLPEPGNYRDPKWHEI | |
| | | NVSIEMASPFINGDPIRAAVDKRGTDVVTFVKYKAEGE | |
| | | EAKPVCAYKAESFRGVIRSAVARIHMEDGVPLTELTHS | |
| | | DCECLLCQIFGSEYEAGKIRFEDLVFESDPEPVTFDHV | |
| | | AIDRFTGGAADKKKFDDSPLPGSPARPLMLKGSFWIRR | |
| | | DVLEDEEYCKALGKALADVNNGLYPLGGKSAIGYGQVK | |
| | | SLGIKGDDKRISRLMNPAFDETDVAVPEKPKTDAEVRI | |
| | | EAEKVYYPHYFVEPHKKVEREEKPCGHQKFHEGRLTGK | |
| | | IRCKLITKTPLIVPDTSNDDFFRPADKEARKEKDEYHK | |
| | | SYAFFRLHKQIMIPGSELRGMVSSVYETVTNSCFRIFD | |
| | | ETKRLSWRMDAKHQNVLQKFLPGRVTADGKHIQKFSGG | |
| | | GSRTVDDRMIGKRMSADLRPCHGDWVEDGDLSALNAYP | |
| | | EKRLLLRHPKGLCPACRLFGTGSYKGRVRFGFASLEND | |
| | | PEWLIPGKNPGDPFHGGPVMLSLLERPRPTWSIPGSDN | |
| | | KFKVPGRKFYVHHHAWKTIKDGNHPTTGKAIEQSPNNR | |
| | | TVEALAGGNSFSFEIAFENLKEWELGLLIHSLQLEKGL | |
| | | AHKLGMAKSMGFGSVEIDVESVRLRKDWKQWRNGNSEI | |
| | | PNWLGKGFAKLKEWFRDELDFIENLKKLLWFPEGDQAP | |
| | | RVCYPMLRKKDDPNGNSGYEELKRGEFKKEDRQKKLTT | |
| | | PWTPWAKRTADGSEFESPKKKRKV | |
| 484 | NewSmallCas- | MKRTADGSEFESPKKKRKVTTTMKISIEFLEPFRMTKW | 1354 |
| | S1006- | QESTRRNKNNKEFVRGQAFARWHRNKKDNTKGRPYITG | |
| | R1294- | TLLRSAVIRSAENLLTLSDGKISEKTCCPGKFDTEDKD | |
| | Cas711S- | RLLQLRQRSTLRWTDKNPCPDNAETYCPFCELLGRSGN | |
| | D1580R- | DGKKAEKKDWRFRIHFGNLSLPGKPDFDGPKAIGSQRV | |
| | D988K- | LNRVDFKSGKAHDFFKAYEVDHTRFPRFEGEITIDNKV | |
| | D981K- | SAEARKLLCDSLKFTDRLCGALCVIRFDEYTPAADSGK | |
| | Y312K | QTENVQAEPNANLAEKTAEQIISILDDNKKTEYTRLLA | |
| | | DAIRSLRRSSKLVAGLPKDHDGKDDHKLWDIGKKKKDE | |
| | | NSVTIRQILTTSADTKELKNAGKWREFCEKLGEALYLK | |
| | | SKDMSGGLKITRRILGDAEFHGKPDRLEKSRSVSIGSV | |
| | | LKETVVCGELVAKTPFFFGAIDEDAKQTDLQVLLTPDN | |
| | | KYRLPRSAVRGILRRDLQTYFDSPCNAELGGRPCMCKT | |
| | | CRIMRGITVMDARSEYNAPPEIRHRTRINPFTGTVAEG | |
| | | ALFNMEVAPEGIVFPFQLRYRGSEDGLPDALKTVLKWW | |
| | | AEGQAFMSGAASTGKGRFRMENAKYETLDLSDENQRND | |
| | | YLKNWGWRDEKGLEELKKRLNSGLPEPGNYRDPKWHEI | |
| | | NVSIEMASPFINGDPIRAAVDKRGTDVVTFVKYKAEGE | |
| | | EAKPVCAYKAESFRGVIRSAVARIHMEDGVPLTELTHS | |
| | | DCECLLCQIFGSEYEAGKIRFEDLVFESDPEPVTFDHV | |
| | | AIDRFTGGAADKKKFDDSPLPGSPARPLMLKGSFWIRR | |
| | | DVLEDEEYCKALGKALADVNNGLYPLGGKSAIGYGQVK | |
| | | SLGIKGDDKRISRLMNPAFDETDVAVPEKPKTDAEVRI | |
| | | EAEKVYYPHYFVEPHKKVEREEKPCGHQKFHEGRLTGK | |
| | | IRCKLITKTPLIVPDTSNDDFFRPADKEARKEKDEYHK | |
| | | SYAFFRLHKQIMIPGSELRGMVSSVYETVTNSCFRIFD | |
| | | ETKRLSWRMDAKHQNVLQKFLPGRVTADGKHIQKFSGG | |
| | | GSRTVDDRMIGKRMSADLRPCHGDWVEDGDLSALNAYP | |
| | | EKRLLLRHPKGLCPACRLFGTGSYKGRVRFGFASLEND | |
| | | PEWLIPGKNPGDPFHGGPVMLSLLERPRPTWSIPGSDN | |
| | | KFKVPGRKFYVHHHAWKTIKDGNHPTTGKAIEQSPNNR | |
| | | TVEALAGGNSFSFEIAFENLKEWELGLLIHSLQLEKGL | |
| | | AHKLGMAKSMGFGSVEIDVESVRLRKDWKQWRNGNSEI | |
| | | PNWLGKGFAKLKEWFRDELDFIENLKKLLWFPEGDQAP | |
| | | RVCYPMLRKKDDPNGNSGYEELKRGEFKKEDRQKKLTT | |
| | | PWTPWAKRTADGSEFESPKKKRKV | |
| 485 | NewSmallCas- | MKRTADGSEFESPKKKRKVTTTMKISIEFLEPFRMTKW | 1479 |
| | S1006- | QESTRRNKNNKEFVRGQAFARWHRNKKDNTKGRPYITG | |
| | R1294- | TLLRSAVIRSAENLLTLSDGKISEKTCCPGKFDTEDKD | |
| | Cas711S- | RLLQLRQRSTLRWTDKNPCPDNAETYCPFCELLGRSGN | |
| | SF3B6- | DGKKAEKKDWRFRIHFGNLSLPGKPDFDGPKAIGSQRV | |
| | fusion | LNRVDFKSGKAHDFFKAYEVDHTRFPRFEGEITIDNKV | |
| | | SAEARKLLCDSLKFTDRLCGALCVIRFDEYTPAADSGK | |
| | | QTENVQAEPNANLAEKTAEQIISILDDNKKTEYTRLLA | |
| | | DAIRSLRRSSKLVAGLPKDHDGKDDHYLWDIGKKKKDE | |
| | | NSVTIRQILTTSADTKELKNAGKWREFCEKLGEALYLK | |
| | | SKDMSGGLKITRRILGDAEFHGKPDRLEKSRSVSIGSV | |
| | | LKETVVCGELVAKTPFFFGAIDEDAKQTDLQVLLTPDN | |
| | | KYRLPRSAVRGILRRDLQTYFDSPCNAELGGRPCMCKT | |
| | | CRIMRGITVMDARSEYNAPPEIRHRTRINPFTGTVAEG | |
| | | ALFNMEVAPEGIVFPFQLRYRGSEDGLPDALKTVLKWW | |
| | | AEGQAFMSGAASTGKGRFRMENAKYETLDLSDENQRND | |
| | | YLKNWGWRDEKGLEELKKRLNSGLPEPGNYRDPKWHEI | |
| | | NVSIEMASPFINGDPIRAAVDKRGTDVVTFVKYKAEGE | |
| | | EAKPVCAYKAESFRGVIRSAVARIHMEDGVPLTELTHS | |
| | | DCECLLCQIFGSEYEAGKIRFEDLVFESDPEPVTFDHV | |
| | | AIDRFTGGAADKKKFDDSPLPGSPARPLMLKGSFWIRR | |
| | | DVLEDEEYCKALGKALADVNNGLYPLGGKSAIGYGQVK | |
| | | SLGIKGDDKRISRLMNPAFDETDVAVPEKPKTDAEVRI | |
| | | EAEKVYYPHYFVEPHKKVEREEKPCGHQKFHEGRLTGK | |
| | | IRCKLITKTPLIVPDTSNDDFFRPADKEARKEKDEYHK | |
| | | SYAFFRLHKQIMIPGSELRGMVSSVYETVTNSCFRIFD | |
| | | ETKRLSWRMDADHQNVLQDFLPGRVTADGKHIQKFSGG | |
| | | GSRTVDDRMIGKRMSADLRPCHGDWVEDGDLSALNAYP | |
| | | EKRLLLRHPKGLCPACRLFGTGSYKGRVRFGFASLEND | |
| | | PEWLIPGKNPGDPFHGGPVMLSLLERPRPTWSIPGSDN | |
| | | KFKVPGRKFYVHHHAWKTIKDGNHPTTGKAIEQSPNNR | |
| | | TVEALAGGNSFSFEIAFENLKEWELGLLIHSLQLEKGL | |
| | | AHKLGMAKSMGFGSVEIDVESVRLRKDWKQWRNGNSEI | |
| | | PNWLGKGFAKLKEWFRDELDFIENLKKLLWFPEGDQAP | |
| | | RVCYPMLRKKDDPNGNSGYEELKDGEFKKEDRQKKLTT | |
| | | PWTPWAMAMQAAKRANIRLPPEVNRILYIRNLPYKITA | |
| | | EEMYDIFGKYGPIRQIRVGNTPETRGTAYVVYEDIFDA | |
| | | KNACDHLSGFNVCNRYLVVLYYNANRAFQKMDTKKKEE | |
| | | QLKLLKEKYGINTDPPKKRTADGSEFESPKKKRKV | |
| 486 | NewSmallCas- | MKRTADGSEFESPKKKRKVTTTMKISIEFLEPFRMTKW | 1594 |
| | S1006- | QESTRRNKNNKEFVRGQAFARWHRNKKDNTKGRPYITG | |
| | R1294- | TLLRSAVIRSAENLLTLSDGKISEKTCCPGKFDTEDKD | |
| | Cas711S- | RLLQLRQRSTLRWTDKNPCPDNAETYCPFCELLGRSGN | |
| | U2AF1- | DGKKAEKKDWRFRIHFGNLSLPGKPDFDGPKAIGSQRV | |
| | fusion | LNRVDFKSGKAHDFFKAYEVDHTRFPRFEGEITIDNKV | |
| | | SAEARKLLCDSLKFTDRLCGALCVIRFDEYTPAADSGK | |
| | | QTENVQAEPNANLAEKTAEQIISILDDNKKTEYTRLLA | |
| | | DAIRSLRRSSKLVAGLPKDHDGKDDHYLWDIGKKKKDE | |
| | | NSVTIRQILTTSADTKELKNAGKWREFCEKLGEALYLK | |
| | | SKDMSGGLKITRRILGDAEFHGKPDRLEKSRSVSIGSV | |
| | | LKETVVCGELVAKTPFFFGAIDEDAKQTDLQVLLTPDN | |
| | | KYRLPRSAVRGILRRDLQTYFDSPCNAELGGRPCMCKT | |
| | | CRIMRGITVMDARSEYNAPPEIRHRTRINPFTGTVAEG | |
| | | ALFNMEVAPEGIVFPFQLRYRGSEDGLPDALKTVLKWW | |
| | | AEGQAFMSGAASTGKGRFRMENAKYETLDLSDENQRND | |
| | | YLKNWGWRDEKGLEELKKRLNSGLPEPGNYRDPKWHEI | |
| | | NVSIEMASPFINGDPIRAAVDKRGTDVVTFVKYKAEGE | |
| | | EAKPVCAYKAESFRGVIRSAVARIHMEDGVPLTELTHS | |
| | | DCECLLCQIFGSEYEAGKIRFEDLVFESDPEPVTFDHV | |
| | | AIDRFTGGAADKKKFDDSPLPGSPARPLMLKGSFWIRR | |
| | | DVLEDEEYCKALGKALADVNNGLYPLGGKSAIGYGQVK | |
| | | SLGIKGDDKRISRLMNPAFDETDVAVPEKPKTDAEVRI | |
| | | EAEKVYYPHYFVEPHKKVEREEKPCGHQKFHEGRLTGK | |
| | | IRCKLITKTPLIVPDTSNDDFFRPADKEARKEKDEYHK | |
| | | SYAFFRLHKQIMIPGSELRGMVSSVYETVTNSCFRIFD | |
| | | ETKRLSWRMDADHQNVLQDFLPGRVTADGKHIQKFSGG | |
| | | GSRTVDDRMIGKRMSADLRPCHGDWVEDGDLSALNAYP | |
| | | EKRLLLRHPKGLCPACRLFGTGSYKGRVRFGFASLEND | |
| | | PEWLIPGKNPGDPFHGGPVMLSLLERPRPTWSIPGSDN | |
| | | KFKVPGRKFYVHHHAWKTIKDGNHPTTGKAIEQSPNNR | |
| | | TVEALAGGNSFSFEIAFENLKEWELGLLIHSLQLEKGL | |
| | | AHKLGMAKSMGFGSVEIDVESVRLRKDWKQWRNGNSEI | |
| | | PNWLGKGFAKLKEWERDELDFIENLKKLLWFPEGDQAP | |
| | | RVCYPMLRKKDDPNGNSGYEELKDGEFKKEDRQKKLTT | |
| | | PWTPWAMAEYLASIFGTEKDKVNCSFYFKIGACRHGDR | |
| | | CSRLHNKPTFSQTIALLNIYRNPQNSSQSADGLRCAVS | |
| | | DVEMQEHYDEFFEEVFTEMEEKYGEVEEMNVCDNLGDH | |
| | | LVGNVYVKFRREEDAEKAVIDLNNRWFNGQPLHAELSP | |
| | | VTDFREACCRQYEMGECTRGGFCNFMHLKPISRELRRE | |
| | | LYGRRRKKHRSRSRSRERRSRSRDRGRGGGGGGGGGGG | |
| | | GRERDRRRSRDRERSGRFKRTADGSEFESPKKKRKV | |
| 487 | NewSmallCas- | MKRTADGSEFESPKKKRKVTTTMKISIEFLEPFRMTKW | 1755 |
| | S1006- | QESTRRNKNNKEFVRGQAFARWHRNKKDNTKGRPYITG | |
| | R1294- | TLLRSAVIRSAENLLTLSDGKISEKTCCPGKFDTEDKD | |
| | Cas711S- | RLLQLRQRSTLRWTDKNPCPDNAETYCPFCELLGRSGN | |
| | RBM17- | DGKKAEKKDWRFRIHFGNLSLPGKPDFDGPKAIGSQRV | |
| | fusion | LNRVDFKSGKAHDFFKAYEVDHTRFPRFEGEITIDNKV | |
| | | SAEARKLLCDSLKFTDRLCGALCVIRFDEYTPAADSGK | |
| | | QTENVQAEPNANLAEKTAEQIISILDDNKKTEYTRLLA | |
| | | DAIRSLRRSSKLVAGLPKDHDGKDDHYLWDIGKKKKDE | |
| | | NSVTIRQILTTSADTKELKNAGKWREFCEKLGEALYLK | |
| | | SKDMSGGLKITRRILGDAEFHGKPDRLEKSRSVSIGSV | |
| | | LKETVVCGELVAKTPFFFGAIDEDAKQTDLQVLLTPDN | |
| | | KYRLPRSAVRGILRRDLQTYFDSPCNAELGGRPCMCKT | |
| | | CRIMRGITVMDARSEYNAPPEIRHRTRINPFTGTVAEG | |
| | | ALFNMEVAPEGIVFPFQLRYRGSEDGLPDALKTVLKWW | |
| | | AEGQAFMSGAASTGKGRFRMENAKYETLDLSDENQRND | |
| | | YLKNWGWRDEKGLEELKKRLNSGLPEPGNYRDPKWHEI | |
| | | NVSIEMASPFINGDPIRAAVDKRGTDVVTFVKYKAEGE | |
| | | EAKPVCAYKAESFRGVIRSAVARIHMEDGVPLTELTHS | |
| | | DCECLLCQIFGSEYEAGKIRFEDLVFESDPEPVTFDHV | |
| | | AIDRFTGGAADKKKFDDSPLPGSPARPLMLKGSFWIRR | |
| | | DVLEDEEYCKALGKALADVNNGLYPLGGKSAIGYGQVK | |
| | | SLGIKGDDKRISRLMNPAFDETDVAVPEKPKTDAEVRI | |
| | | EAEKVYYPHYFVEPHKKVEREEKPCGHQKFHEGRLTGK | |
| | | IRCKLITKTPLIVPDTSNDDFFRPADKEARKEKDEYHK | |
| | | SYAFFRLHKQIMIPGSELRGMVSSVYETVTNSCFRIFD | |
| | | ETKRLSWRMDADHQNVLQDFLPGRVTADGKHIQKFSGG | |
| | | GSRTVDDRMIGKRMSADLRPCHGDWVEDGDLSALNAYP | |
| | | EKRLLLRHPKGLCPACRLFGTGSYKGRVRFGFASLEND | |
| | | PEWLIPGKNPGDPFHGGPVMLSLLERPRPTWSIPGSDN | |
| | | KFKVPGRKFYVHHHAWKTIKDGNHPTTGKAIEQSPNNR | |
| | | TVEALAGGNSFSFEIAFENLKEWELGLLIHSLQLEKGL | |
| | | AHKLGMAKSMGFGSVEIDVESVRLRKDWKQWRNGNSEI | |
| | | PNWLGKGFAKLKEWFRDELDFIENLKKLLWFPEGDQAP | |
| | | RVCYPMLRKKDDPNGNSGYEELKDGEFKKEDRQKKLTT | |
| | | PWTPWAMSLYDDLGVETSDSKTEGWSKNFKLLQSQLQV | |
| | | KKAALTQAKSQRTKQSTVLAPVIDLKRGGSSDDRQIVD | |
| | | TPPHVAAGLKDPVPSGFSAGEVLIPLADEYDPMFPNDY | |
| | | EKVVKRQREERQRQRELERQKEIEEREKRRKDRHEASG | |
| | | FARRPDPDSDEDEDYERERRKRSMGGAAIAPPTSLVEK | |
| | | DKELPRDFPYEEDSRPRSQSSKAAIPPPVYEEQDRPRS | |
| | | PTGPSNSFLANMGGTVAHKIMQKYGFREGQGLGKHEQG | |
| | | LSTALSVEKTSKRGGKIIVGDATEKDASKKSDSNPLTE | |
| | | ILKCPTKVVLLRNMVGAGEVDEDLEVETKEECEKYGKV | |
| | | GKCVIFEIPGAPDDEAVRIFLEFERVESAIKAVVDLNG | |
| | | RYFGGRVVKACFYNLDKFRVLDLAEQVKRTADGSEFES | |
| | | PKKKRKV | |
| 488 | NewSmallCas- | MKRTADGSEFESPKKKRKVTTTMKISIEFLEPFRMTKW | 1829 |
| | S1006- | QESTRRNKNNKEFVRGQAFARWHRNKKDNTKGRPYITG | |
| | R1294- | TLLRSAVIRSAENLLTLSDGKISEKTCCPGKFDTEDKD | |
| | Cas711S- | RLLQLRQRSTLRWTDKNPCPDNAETYCPFCELLGRSGN | |
| | U2AF2- | DGKKAEKKDWRFRIHFGNLSLPGKPDFDGPKAIGSQRV | |
| | fusion | LNRVDFKSGKAHDFFKAYEVDHTRFPRFEGEITIDNKV | |
| | | SAEARKLLCDSLKFTDRLCGALCVIRFDEYTPAADSGK | |
| | | QTENVQAEPNANLAEKTAEQIISILDDNKKTEYTRLLA | |
| | | DAIRSLRRSSKLVAGLPKDHDGKDDHYLWDIGKKKKDE | |
| | | NSVTIRQILTTSADTKELKNAGKWREFCEKLGEALYLK | |
| | | SKDMSGGLKITRRILGDAEFHGKPDRLEKSRSVSIGSV | |
| | | LKETVVCGELVAKTPFFFGAIDEDAKQTDLQVLLTPDN | |
| | | KYRLPRSAVRGILRRDLQTYFDSPCNAELGGRPCMCKT | |
| | | CRIMRGITVMDARSEYNAPPEIRHRTRINPFTGTVAEG | |
| | | ALFNMEVAPEGIVFPFQLRYRGSEDGLPDALKTVLKWW | |
| | | AEGQAFMSGAASTGKGRFRMENAKYETLDLSDENQRND | |
| | | YLKNWGWRDEKGLEELKKRLNSGLPEPGNYRDPKWHEI | |
| | | NVSIEMASPFINGDPIRAAVDKRGTDVVTFVKYKAEGE | |
| | | EAKPVCAYKAESFRGVIRSAVARIHMEDGVPLTELTHS | |
| | | DCECLLCQIFGSEYEAGKIRFEDLVFESDPEPVTFDHV | |
| | | AIDRFTGGAADKKKFDDSPLPGSPARPLMLKGSFWIRR | |
| | | DVLEDEEYCKALGKALADVNNGLYPLGGKSAIGYGQVK | |
| | | SLGIKGDDKRISRLMNPAFDETDVAVPEKPKTDAEVRI | |
| | | EAEKVYYPHYFVEPHKKVEREEKPCGHQKFHEGRLTGK | |
| | | IRCKLITKTPLIVPDTSNDDFFRPADKEARKEKDEYHK | |
| | | SYAFFRLHKQIMIPGSELRGMVSSVYETVTNSCFRIFD | |
| | | ETKRLSWRMDADHQNVLQDFLPGRVTADGKHIQKFSGG | |
| | | GSRTVDDRMIGKRMSADLRPCHGDWVEDGDLSALNAYP | |
| | | EKRLLLRHPKGLCPACRLFGTGSYKGRVRFGFASLEND | |
| | | PEWLIPGKNPGDPFHGGPVMLSLLERPRPTWSIPGSDN | |
| | | KFKVPGRKFYVHHHAWKTIKDGNHPTTGKAIEQSPNNR | |
| | | TVEALAGGNSFSFEIAFENLKEWELGLLIHSLQLEKGL | |
| | | AHKLGMAKSMGFGSVEIDVESVRLRKDWKQWRNGNSEI | |
| | | PNWLGKGFAKLKEWFRDELDFIENLKKLLWFPEGDQAP | |
| | | RVCYPMLRKKDDPNGNSGYEELKDGEFKKEDRQKKLTT | |
| | | PWTPWAMSDFDEFERQLNENKQERDKENRHRKRSHSRS | |
| | | RSRDRKRRSRSRDRRNRDQRSASRDRRRRSKPLTRGAK | |
| | | EEHGGLIRSPRHEKKKKVRKYWDVPPPGFEHITPMQYK | |
| | | AMQAAGQIPATALLPTMTPDGLAVTPTPVPVVGSQMTR | |
| | | QARRLYVGNIPFGITEEAMMDFFNAQMRLGGLTQAPGN | |
| | | PVLAVQINQDKNFAFLEFRSVDETTQAMAFDGIIFQGQ | |
| | | SLKIRRPHDYQPLPGMSENPSVYVPGVVSTVVPDSAHK | |
| | | LFIGGLPNYLNDDQVKELLTSFGPLKAFNLVKDSATGL | |
| | | SKGYAFCEYVDINVTDQAIAGLNGMQLGDKKLLVQRAS | |
| | | VGAKNATLVSPPSTINQTPVTLQVPGLMSSQVQMGGHP | |
| | | TEVLCLMNMVLPEELLDDEEYEEIVEDVRDECSKYGLV | |
| | | KSIEIPRPVDGVEVPGCGKIFVEFTSVFDCQKAMQGLT | |
| | | GRKFANRVVVTKYCDPDSYHRRDFWKRTADGSEFESPK | |
| | | KKRKV | |
| 489 | NewSmallCas- | MKRTADGSEFESPKKKRKVTTTMKISIEFLEPFRMTKW | 1354 |
| | S1006- | QESTRRNKNNKEFVRGQAFARWHRNKKDNTKGRPYITG | |
| | R1294- | TLLRSAVIRSAENLLTLSDGKISEKTCCPGKFDTEDKD | |
| | Cas711S- | RLLQLRQRSTLRWTDKNPCPDNAETYCPFCELLGRSGN | |
| | D1580R- | DGKKAEKKDWRFRIHFGNLSLPGKPDFDGPKAIGSQRV | |
| | D988K- | LNRVDFKSGKAHDFFKAYEVDHTRFPRFEGEITIDNKV | |
| | E279R | SAEARKLLCDSLKFTDRLCGALCVIRFDEYTPAADSGK | |
| | | QTENVQAEPNANLAEKTAEQIISILDDNKKTRYTRLLA | |
| | | DAIRSLRRSSKLVAGLPKDHDGKDDHYLWDIGKKKKDE | |
| | | NSVTIRQILTTSADTKELKNAGKWREFCEKLGEALYLK | |
| | | SKDMSGGLKITRRILGDAEFHGKPDRLEKSRSVSIGSV | |
| | | LKETVVCGELVAKTPFFFGAIDEDAKQTDLQVLLTPDN | |
| | | KYRLPRSAVRGILRRDLQTYFDSPCNAELGGRPCMCKT | |
| | | CRIMRGITVMDARSEYNAPPEIRHRTRINPFTGTVAEG | |
| | | ALFNMEVAPEGIVFPFQLRYRGSEDGLPDALKTVLKWW | |
| | | AEGQAFMSGAASTGKGRFRMENAKYETLDLSDENQRND | |
| | | YLKNWGWRDEKGLEELKKRLNSGLPEPGNYRDPKWHEI | |
| | | NVSIEMASPFINGDPIRAAVDKRGTDVVTFVKYKAEGE | |
| | | EAKPVCAYKAESFRGVIRSAVARIHMEDGVPLTELTHS | |
| | | DCECLLCQIFGSEYEAGKIRFEDLVFESDPEPVTFDHV | |
| | | AIDRFTGGAADKKKFDDSPLPGSPARPLMLKGSFWIRR | |
| | | DVLEDEEYCKALGKALADVNNGLYPLGGKSAIGYGQVK | |
| | | SLGIKGDDKRISRLMNPAFDETDVAVPEKPKTDAEVRI | |
| | | EAEKVYYPHYFVEPHKKVEREEKPCGHQKFHEGRLTGK | |
| | | IRCKLITKTPLIVPDTSNDDFFRPADKEARKEKDEYHK | |
| | | SYAFFRLHKQIMIPGSELRGMVSSVYETVTNSCFRIFD | |
| | | ETKRLSWRMDADHQNVLQKFLPGRVTADGKHIQKFSGG | |
| | | GSRTVDDRMIGKRMSADLRPCHGDWVEDGDLSALNAYP | |
| | | EKRLLLRHPKGLCPACRLFGTGSYKGRVRFGFASLEND | |
| | | PEWLIPGKNPGDPFHGGPVMLSLLERPRPTWSIPGSDN | |
| | | KFKVPGRKFYVHHHAWKTIKDGNHPTTGKAIEQSPNNR | |
| | | TVEALAGGNSFSFEIAFENLKEWELGLLIHSLQLEKGL | |
| | | AHKLGMAKSMGFGSVEIDVESVRLRKDWKQWRNGNSEI | |
| | | PNWLGKGFAKLKEWFRDELDFIENLKKLLWFPEGDQAP | |
| | | RVCYPMLRKKDDPNGNSGYEELKRGEFKKEDRQKKLTT | |
| | | PWTPWAKRTADGSEFESPKKKRKV | |
| 490 | NewSmallCas- | MKRTADGSEFESPKKKRKVTTTMKISIEFLEPFRMTKW | 1354 |
| | S1006- | QESTRRNKNNKEFVRGQAFARWHRNKKDNTKGRPYITG | |
| | R1294- | TLLRSAVIRSAENLLTLSDGKISEKTCCPGKFDTEDKD | |
| | Cas711S- | RLLQLRQRSTLRWTDKNPCPDNAETYCPFCELLGRSGN | |
| | D1580R- | DGKKAEKKDWRFRIHFGNLSLPGKPDFDGPKAIGSQRV | |
| | D988K- | LNRVDFKSGKAHDFFKAYEVDHTRFPRFEGEITIDNKV | |
| | Y312K | SAEARKLLCDSLKFTDRLCGALCVIRFDEYTPAADSGK | |
| | | QTENVQAEPNANLAEKTAEQIISILDDNKKTEYTRLLA | |
| | | DAIRSLRRSSKLVAGLPKDHDGKDDHKLWDIGKKKKDE | |
| | | NSVTIRQILTTSADTKELKNAGKWREFCEKLGEALYLK | |
| | | SKDMSGGLKITRRILGDAEFHGKPDRLEKSRSVSIGSV | |
| | | LKETVVCGELVAKTPFFFGAIDEDAKQTDLQVLLTPDN | |
| | | KYRLPRSAVRGILRRDLQTYFDSPCNAELGGRPCMCKT | |
| | | CRIMRGITVMDARSEYNAPPEIRHRTRINPFTGTVAEG | |
| | | ALFNMEVAPEGIVFPFQLRYRGSEDGLPDALKTVLKWW | |
| | | AEGQAFMSGAASTGKGRFRMENAKYETLDLSDENQRND | |
| | | YLKNWGWRDEKGLEELKKRLNSGLPEPGNYRDPKWHEI | |
| | | NVSIEMASPFINGDPIRAAVDKRGTDVVTFVKYKAEGE | |
| | | EAKPVCAYKAESFRGVIRSAVARIHMEDGVPLTELTHS | |
| | | DCECLLCQIFGSEYEAGKIRFEDLVFESDPEPVTFDHV | |
| | | AIDRFTGGAADKKKFDDSPLPGSPARPLMLKGSFWIRR | |
| | | DVLEDEEYCKALGKALADVNNGLYPLGGKSAIGYGQVK | |
| | | SLGIKGDDKRISRLMNPAFDETDVAVPEKPKTDAEVRI | |
| | | EAEKVYYPHYFVEPHKKVEREEKPCGHQKFHEGRLTGK | |
| | | IRCKLITKTPLIVPDTSNDDFFRPADKEARKEKDEYHK | |
| | | SYAFFRLHKQIMIPGSELRGMVSSVYETVTNSCFRIFD | |
| | | ETKRLSWRMDADHQNVLQKFLPGRVTADGKHIQKFSGG | |
| | | GSRTVDDRMIGKRMSADLRPCHGDWVEDGDLSALNAYP | |
| | | EKRLLLRHPKGLCPACRLFGTGSYKGRVRFGFASLEND | |
| | | PEWLIPGKNPGDPFHGGPVMLSLLERPRPTWSIPGSDN | |
| | | KFKVPGRKFYVHHHAWKTIKDGNHPTTGKAIEQSPNNR | |
| | | TVEALAGGNSFSFEIAFENLKEWELGLLIHSLQLEKGL | |
| | | AHKLGMAKSMGFGSVEIDVESVRLRKDWKQWRNGNSEI | |
| | | PNWLGKGFAKLKEWFRDELDFIENLKKLLWFPEGDQAP | |
| | | RVCYPMLRKKDDPNGNSGYEELKRGEFKKEDRQKKLTT | |
| | | PWTPWAKRTADGSEFESPKKKRKV | |
| 491 | NewTriple- | MKRTADGSEFESPKKKRKVTTTMKISIEFLEPFRMTKW | 1637 |
| | Mutant- | QESTRRNKNNKEFVRGQAFARWHRNKKDNTKGRPYITG | |
| | Cas711- | TLLRSAVIRSAENLLTLSDGKISEKTCCPGKFDTEDKD | |
| | D1580R- | RLLQLRQRSTLRWTDKNPCPDNAETYCPFCELLGRSGN | |
| | D988K- | DGKKAEKKDWRFRIHFGNLSLPGKPDFDGPKAIGSQRV | |
| | Y312K | LNRVDFKSGKAHDFFKAYEVDHTRFPRFEGEITIDNKV | |
| | | SAEARKLLCDSLKFTDRLCGALCVIRFDEYTPAADSGK | |
| | | QTENVQAEPNANLAEKTAEQIISILDDNKKTEYTRLLA | |
| | | DAIRSLRRSSKLVAGLPKDHDGKDDHKLWDIGKKKKDE | |
| | | NSVTIRQILTTSADTKELKNAGKWREFCEKLGEALYLK | |
| | | SKDMSGGLKITRRILGDAEFHGKPDRLEKSRSVSIGSV | |
| | | LKETVVCGELVAKTPFFFGAIDEDAKQTDLQVLLTPDN | |
| | | KYRLPRSAVRGILRRDLQTYFDSPCNAELGGRPCMCKT | |
| | | CRIMRGITVMDARSEYNAPPEIRHRTRINPFTGTVAEG | |
| | | ALFNMEVAPEGIVFPFQLRYRGSEDGLPDALKTVLKWW | |
| | | AEGQAFMSGAASTGKGRFRMENAKYETLDLSDENQRND | |
| | | YLKNWGWRDEKGLEELKKRLNSGLPEPGNYRDPKWHEI | |
| | | NVSIEMASPFINGDPIRAAVDKRGTDVVTFVKYKAEGE | |
| | | EAKPVCAYKAESFRGVIRSAVARIHMEDGVPLTELTHS | |
| | | DCECLLCQIFGSEYEAGKIRFEDLVFESDPEPVTFDHV | |
| | | AIDRFTGGAADKKKFDDSPLPGSPARPLMLKGSFWIRR | |
| | | DVLEDEEYCKALGKALADVNNGLYPLGGKSAIGYGQVK | |
| | | SLGIKGDDKRISRLMNPAFDETDVAVPEKPKTDAEVRI | |
| | | EAEKVYYPHYFVEPHKKVEREEKPCGHQKFHEGRLTGK | |
| | | IRCKLITKTPLIVPDTSNDDFFRPADKEARKEKDEYHK | |
| | | SYAFFRLHKQIMIPGSELRGMVSSVYETVTNSCFRIFD | |
| | | ETKRLSWRMDADHQNVLQKFLPGRVTADGKHIQKFSET | |
| | | ARVPFYDKTQKHFDILDEQEIAGEKPVRMWVKRFIKRL | |
| | | SLVDPAKHPQKKQDNKWKRRKEGIATFIEQKNGSYYFN | |
| | | VVTNNGCTSFHLWHKPDNFDQEKLEGIQNGEKLDCWVR | |
| | | DSRYQKAFQEIPENDPDGWECKEGYLHVVGPSKVEFSD | |
| | | KKGDVINNFQGTLPSVPNDWKTIRTNDFKNRKRKNEPV | |
| | | FCCEDDKGNYYTMAKYCETFFFDLKENEEYEIPEKARI | |
| | | KYKELLRVYNNNPQAVPESVFQSRVARENVEKLKSGDL | |
| | | VYFKHNEKYVEDIVPVRISRTVDDRMIGKRMSADLRPC | |
| | | HGDWVEDGDLSALNAYPEKRLLLRHPKGLCPACRLFGT | |
| | | GSYKGRVRFGFASLENDPEWLIPGKNPGDPFHGGPVML | |
| | | SLLERPRPTWSIPGSDNKFKVPGRKFYVHHHAWKTIKD | |
| | | GNHPTTGKAIEQSPNNRTVEALAGGNSFSFEIAFENLK | |
| | | EWELGLLIHSLQLEKGLAHKLGMAKSMGFGSVEIDVES | |
| | | VRLRKDWKQWRNGNSEIPNWLGKGFAKLKEWFRDELDF | |
| | | IENLKKLLWFPEGDQAPRVCYPMLRKKDDPNGNSGYEE | |
| | | LKRGEFKKEDRQKKLTTPWTPWAKRTADGSEFESPKKK | |
| | | RKV | |
| 492 | pDF0910_ | MKRTADGSEFESPKKKRKVTTTMKISIEFLEPFRMTKW | 1762 |
| | Cas711_ | QESTRRNKNNKEFVRGQAFARWHRNKKDNTKGRPYITG | |
| | SF3B6_ | TLLRSAVIRSAENLLTLSDGKISEKTCCPGKFDTEDKD | |
| | Ct_ | RLLQLRQRSTLRWTDKNPCPDNAETYCPFCELLGRSGN | |
| | directfusion | DGKKAEKKDWRFRIHFGNLSLPGKPDFDGPKAIGSQRV | |
| | | LNRVDFKSGKAHDFFKAYEVDHTRFPRFEGEITIDNKV | |
| | | SAEARKLLCDSLKFTDRLCGALCVIRFDEYTPAADSGK | |
| | | QTENVQAEPNANLAEKTAEQIISILDDNKKTEYTRLLA | |
| | | DAIRSLRRSSKLVAGLPKDHDGKDDHYLWDIGKKKKDE | |
| | | NSVTIRQILTTSADTKELKNAGKWREFCEKLGEALYLK | |
| | | SKDMSGGLKITRRILGDAEFHGKPDRLEKSRSVSIGSV | |
| | | LKETVVCGELVAKTPFFFGAIDEDAKQTDLQVLLTPDN | |
| | | KYRLPRSAVRGILRRDLQTYFDSPCNAELGGRPCMCKT | |
| | | CRIMRGITVMDARSEYNAPPEIRHRTRINPFTGTVAEG | |
| | | ALFNMEVAPEGIVFPFQLRYRGSEDGLPDALKTVLKWW | |
| | | AEGQAFMSGAASTGKGRFRMENAKYETLDLSDENQRND | |
| | | YLKNWGWRDEKGLEELKKRLNSGLPEPGNYRDPKWHEI | |
| | | NVSIEMASPFINGDPIRAAVDKRGTDVVTFVKYKAEGE | |
| | | EAKPVCAYKAESFRGVIRSAVARIHMEDGVPLTELTHS | |
| | | DCECLLCQIFGSEYEAGKIRFEDLVFESDPEPVTFDHV | |
| | | AIDRFTGGAADKKKFDDSPLPGSPARPLMLKGSFWIRR | |
| | | DVLEDEEYCKALGKALADVNNGLYPLGGKSAIGYGQVK | |
| | | SLGIKGDDKRISRLMNPAFDETDVAVPEKPKTDAEVRI | |
| | | EAEKVYYPHYFVEPHKKVEREEKPCGHQKFHEGRLTGK | |
| | | IRCKLITKTPLIVPDTSNDDFFRPADKEARKEKDEYHK | |
| | | SYAFFRLHKQIMIPGSELRGMVSSVYETVTNSCFRIFD | |
| | | ETKRLSWRMDADHQNVLQDFLPGRVTADGKHIQKFSET | |
| | | ARVPFYDKTQKHFDILDEQEIAGEKPVRMWVKRFIKRL | |
| | | SLVDPAKHPQKKQDNKWKRRKEGIATFIEQKNGSYYFN | |
| | | VVTNNGCTSFHLWHKPDNFDQEKLEGIQNGEKLDCWVR | |
| | | DSRYQKAFQEIPENDPDGWECKEGYLHVVGPSKVEFSD | |
| | | KKGDVINNFQGTLPSVPNDWKTIRTNDFKNRKRKNEPV | |
| | | FCCEDDKGNYYTMAKYCETFFFDLKENEEYEIPEKARI | |
| | | KYKELLRVYNNNPQAVPESVFQSRVARENVEKLKSGDL | |
| | | VYFKHNEKYVEDIVPVRISRTVDDRMIGKRMSADLRPC | |
| | | HGDWVEDGDLSALNAYPEKRLLLRHPKGLCPACRLFGT | |
| | | GSYKGRVRFGFASLENDPEWLIPGKNPGDPFHGGPVML | |
| | | SLLERPRPTWSIPGSDNKFKVPGRKFYVHHHAWKTIKD | |
| | | GNHPTTGKAIEQSPNNRTVEALAGGNSFSFEIAFENLK | |
| | | EWELGLLIHSLQLEKGLAHKLGMAKSMGFGSVEIDVES | |
| | | VRLRKDWKQWRNGNSEIPNWLGKGFAKLKEWFRDELDF | |
| | | IENLKKLLWFPEGDQAPRVCYPMLRKKDDPNGNSGYEE | |
| | | LKDGEFKKEDRQKKLTTPWTPWAMAMQAAKRANIRLPP | |
| | | EVNRILYIRNLPYKITAEEMYDIFGKYGPIRQIRVGNT | |
| | | PETRGTAYVVYEDIFDAKNACDHLSGFNVCNRYLVVLY | |
| | | YNANRAFQKMDTKKKEEQLKLLKEKYGINTDPPKKRTA | |
| | | DGSEFESPKKKRKV | |
| 493 | pDF0947_ | MKRTADGSEFESPKKKRKVTTTMKISIEFLEPFRMTKW | 2112 |
| | Cas711_ | QESTRRNKNNKEFVRGQAFARWHRNKKDNTKGRPYITG | |
| | U2AF2_ | TLLRSAVIRSAENLLTLSDGKISEKTCCPGKFDTEDKD | |
| | Ct_ | RLLQLRQRSTLRWTDKNPCPDNAETYCPFCELLGRSGN | |
| | directfusion | DGKKAEKKDWRFRIHFGNLSLPGKPDFDGPKAIGSQRV | |
| | | LNRVDFKSGKAHDFFKAYEVDHTRFPRFEGEITIDNKV | |
| | | SAEARKLLCDSLKFTDRLCGALCVIRFDEYTPAADSGK | |
| | | QTENVQAEPNANLAEKTAEQIISILDDNKKTEYTRLLA | |
| | | DAIRSLRRSSKLVAGLPKDHDGKDDHYLWDIGKKKKDE | |
| | | NSVTIRQILTTSADTKELKNAGKWREFCEKLGEALYLK | |
| | | SKDMSGGLKITRRILGDAEFHGKPDRLEKSRSVSIGSV | |
| | | LKETVVCGELVAKTPFFFGAIDEDAKQTDLQVLLTPDN | |
| | | KYRLPRSAVRGILRRDLQTYFDSPCNAELGGRPCMCKT | |
| | | CRIMRGITVMDARSEYNAPPEIRHRTRINPFTGTVAEG | |
| | | ALFNMEVAPEGIVFPFQLRYRGSEDGLPDALKTVLKWW | |
| | | AEGQAFMSGAASTGKGRFRMENAKYETLDLSDENQRND | |
| | | YLKNWGWRDEKGLEELKKRLNSGLPEPGNYRDPKWHEI | |
| | | NVSIEMASPFINGDPIRAAVDKRGTDVVTFVKYKAEGE | |
| | | EAKPVCAYKAESFRGVIRSAVARIHMEDGVPLTELTHS | |
| | | DCECLLCQIFGSEYEAGKIRFEDLVFESDPEPVTFDHV | |
| | | AIDRFTGGAADKKKFDDSPLPGSPARPLMLKGSFWIRR | |
| | | DVLEDEEYCKALGKALADVNNGLYPLGGKSAIGYGQVK | |
| | | SLGIKGDDKRISRLMNPAFDETDVAVPEKPKTDAEVRI | |
| | | EAEKVYYPHYFVEPHKKVEREEKPCGHQKFHEGRLTGK | |
| | | IRCKLITKTPLIVPDTSNDDFFRPADKEARKEKDEYHK | |
| | | SYAFFRLHKQIMIPGSELRGMVSSVYETVTNSCFRIFD | |
| | | ETKRLSWRMDADHQNVLQDFLPGRVTADGKHIQKFSET | |
| | | ARVPFYDKTQKHFDILDEQEIAGEKPVRMWVKRFIKRL | |
| | | SLVDPAKHPQKKQDNKWKRRKEGIATFIEQKNGSYYFN | |
| | | VVTNNGCTSFHLWHKPDNFDQEKLEGIQNGEKLDCWVR | |
| | | DSRYQKAFQEIPENDPDGWECKEGYLHVVGPSKVEFSD | |
| | | KKGDVINNFQGTLPSVPNDWKTIRTNDFKNRKRKNEPV | |
| | | FCCEDDKGNYYTMAKYCETFFFDLKENEEYEIPEKARI | |
| | | KYKELLRVYNNNPQAVPESVFQSRVARENVEKLKSGDL | |
| | | VYFKHNEKYVEDIVPVRISRTVDDRMIGKRMSADLRPC | |
| | | HGDWVEDGDLSALNAYPEKRLLLRHPKGLCPACRLFGT | |
| | | GSYKGRVRFGFASLENDPEWLIPGKNPGDPFHGGPVML | |
| | | SLLERPRPTWSIPGSDNKFKVPGRKFYVHHHAWKTIKD | |
| | | GNHPTTGKAIEQSPNNRTVEALAGGNSFSFEIAFENLK | |
| | | EWELGLLIHSLQLEKGLAHKLGMAKSMGFGSVEIDVES | |
| | | VRLRKDWKQWRNGNSEIPNWLGKGFAKLKEWFRDELDF | |
| | | IENLKKLLWFPEGDQAPRVCYPMLRKKDDPNGNSGYEE | |
| | | LKDGEFKKEDRQKKLTTPWTPWAMSDEDEFERQLNENK | |
| | | QERDKENRHRKRSHSRSRSRDRKRRSRSRDRRNRDQRS | |
| | | ASRDRRRRSKPLTRGAKEEHGGLIRSPRHEKKKKVRKY | |
| | | WDVPPPGFEHITPMQYKAMQAAGQIPATALLPTMTPDG | |
| | | LAVTPTPVPVVGSQMTRQARRLYVGNIPFGITEEAMMD | |
| | | FFNAQMRLGGLTQAPGNPVLAVQINQDKNFAFLEFRSV | |
| | | DETTQAMAFDGIIFQGQSLKIRRPHDYQPLPGMSENPS | |
| | | VYVPGVVSTVVPDSAHKLFIGGLPNYLNDDQVKELLTS | |
| | | FGPLKAFNLVKDSATGLSKGYAFCEYVDINVTDQAIAG | |
| | | LNGMQLGDKKLLVQRASVGAKNATLVSPPSTINQTPVT | |
| | | LQVPGLMSSQVQMGGHPTEVLCLMNMVLPEELLDDEEY | |
| | | EEIVEDVRDECSKYGLVKSIEIPRPVDGVEVPGCGKIF | |
| | | VEFTSVFDCQKAMQGLTGRKFANRVVVTKYCDPDSYHR | |
| | | RDFWKRTADGSEFESPKKKRKV | |
| 477 | PDF0949 | MKRTADGSEFESPKKKRKVTTTMKISIEFLEPFRMTKW | 1637 |
| | double | QESTRRNKNNKEFVRGQAFARWHRNKKDNTKGRPYITG | |
| | mutant | TLLRSAVIRSAENLLTLSDGKISEKTCCPGKFDTEDKD | |
| | | RLLQLRQRSTLRWTDKNPCPDNAETYCPFCELLGRSGN | |
| | | DGKKAEKKDWRFRIHFGNLSLPGKPDFDGPKAIGSQRV | |
| | | LNRVDFKSGKAHDFFKAYEVDHTRFPRFEGEITIDNKV | |
| | | SAEARKLLCDSLKFTDRLCGALCVIRFDEYTPAADSGK | |
| | | QTENVQAEPNANLAEKTAEQIISILDDNKKTEYTRLLA | |
| | | DAIRSLRRSSKLVAGLPKDHDGKDDHYLWDIGKKKKDE | |
| | | NSVTIRQILTTSADTKELKNAGKWREFCEKLGEALYLK | |
| | | SKDMSGGLKITRRILGDAEFHGKPDRLEKSRSVSIGSV | |
| | | LKETVVCGELVAKTPFFFGAIDEDAKQTDLQVLLTPDN | |
| | | KYRLPRSAVRGILRRDLQTYFDSPCNAELGGRPCMCKT | |
| | | CRIMRGITVMDARSEYNAPPEIRHRTRINPFTGTVAEG | |
| | | ALFNMEVAPEGIVEPFQLRYRGSEDGLPDALKTVLKWW | |
| | | AEGQAFMSGAASTGKGRFRMENAKYETLDLSDENQRND | |
| | | YLKNWGWRDEKGLEELKKRLNSGLPEPGNYRDPKWHEI | |
| | | NVSIEMASPFINGDPIRAAVDKRGTDVVTFVKYKAEGE | |
| | | EAKPVCAYKAESFRGVIRSAVARIHMEDGVPLTELTHS | |
| | | DCECLLCQIFGSEYEAGKIRFEDLVFESDPEPVTFDHV | |
| | | AIDRFTGGAADKKKFDDSPLPGSPARPLMLKGSFWIRR | |
| | | DVLEDEEYCKALGKALADVNNGLYPLGGKSAIGYGQVK | |
| | | SLGIKGDDKRISRLMNPAFDETDVAVPEKPKTDAEVRI | |
| | | EAEKVYYPHYFVEPHKKVEREEKPCGHQKFHEGRLTGK | |
| | | IRCKLITKTPLIVPDTSNDDFFRPADKEARKEKDEYHK | |
| | | SYAFFRLHKQIMIPGSELRGMVSSVYETVTNSCFRIFD | |
| | | ETKRLSWRMDADHQNVLQKFLPGRVTADGKHIQKFSET | |
| | | ARVPFYDKTQKHFDILDEQEIAGEKPVRMWVKRFIKRL | |
| | | SLVDPAKHPQKKQDNKWKRRKEGIATFIEQKNGSYYFN | |
| | | VVTNNGCTSFHLWHKPDNFDQEKLEGIQNGEKLDCWVR | |
| | | DSRYQKAFQEIPENDPDGWECKEGYLHVVGPSKVEFSD | |
| | | KKGDVINNFQGTLPSVPNDWKTIRTNDFKNRKRKNEPV | |
| | | FCCEDDKGNYYTMAKYCETFFFDLKENEEYEIPEKARI | |
| | | KYKELLRVYNNNPQAVPESVFQSRVARENVEKLKSGDL | |
| | | VYFKHNEKYVEDIVPVRISRTVDDRMIGKRMSADLRPC | |
| | | HGDWVEDGDLSALNAYPEKRLLLRHPKGLCPACRLFGT | |
| | | GSYKGRVRFGFASLENDPEWLIPGKNPGDPFHGGPVML | |
| | | SLLERPRPTWSIPGSDNKFKVPGRKFYVHHHAWKTIKD | |
| | | GNHPTTGKAIEQSPNNRTVEALAGGNSFSFEIAFENLK | |
| | | EWELGLLIHSLQLEKGLAHKLGMAKSMGFGSVEIDVES | |
| | | VRLRKDWKQWRNGNSEIPNWLGKGFAKLKEWFRDELDF | |
| | | IENLKKLLWFPEGDQAPRVCYPMLRKKDDPNGNSGYEE | |
| | | LKRGEFKKEDRQKKLTTPWTPWAKRTADGSEFESPKKK | |
| | | RKV | |
| 478 | PDF0950 | MKRTADGSEFESPKKKRKVTTTMKISIEFLEPFRMTKW | 1637 |
| | triple | QESTRRNKNNKEFVRGQAFARWHRNKKDNTKGRPYITG | |
| | mutant | TLLRSAVIRSAENLLTLSDGKISEKTCCPGKFDTEDKD | |
| | | RLLQLRQRSTLRWTDKNPCPDNAETYCPFCELLGRSGN | |
| | | DGKKAEKKDWRFRIHFGNLSLPGKPDFDGPKAIGSQRV | |
| | | LNRVDFKSGKAHDFFKAYEVDHTRFPRFEGEITIDNKV | |
| | | SAEARKLLCDSLKFTDRLCGALCVIRFDEYTPAADSGK | |
| | | QTENVQAEPNANLAEKTAEQIISILDDNKKTEYTRLLA | |
| | | DAIRSLRRSSKLVAGLPKDHDGKDDHYLWDIGKKKKDE | |
| | | NSVTIRQILTTSADTKELKNAGKWREFCEKLGEALYLK | |
| | | SKDMSGGLKITRRILGDAEFHGKPDRLEKSRSVSIGSV | |
| | | LKETVVCGELVAKTPFFFGAIDEDAKQTDLQVLLTPDN | |
| | | KYRLPRSAVRGILRRDLQTYFDSPCNAELGGRPCMCKT | |
| | | CRIMRGITVMDARSEYNAPPEIRHRTRINPFTGTVAEG | |
| | | ALFNMEVAPEGIVFPFQLRYRGSEDGLPDALKTVLKWW | |
| | | AEGQAFMSGAASTGKGRFRMENAKYETLDLSDENQRND | |
| | | YLKNWGWRDEKGLEELKKRLNSGLPEPGNYRDPKWHEI | |
| | | NVSIEMASPFINGDPIRAAVDKRGTDVVTFVKYKAEGE | |
| | | EAKPVCAYKAESFRGVIRSAVARIHMEDGVPLTELTHS | |
| | | DCECLLCQIFGSEYEAGKIRFEDLVFESDPEPVTFDHV | |
| | | AIDRFTGGAADKKKFDDSPLPGSPARPLMLKGSFWIRR | |
| | | DVLEDEEYCKALGKALADVNNGLYPLGGKSAIGYGQVK | |
| | | SLGIKGDDKRISRLMNPAFDETDVAVPEKPKTDAEVRI | |
| | | EAEKVYYPHYFVEPHKKVEREEKPCGHQKFHEGRLTGK | |
| | | IRCKLITKTPLIVPDTSNDDFFRPADKEARKEKDEYHK | |
| | | SYAFFRLHKQIMIPGSELRGMVSSVYETVTNSCFRIFD | |
| | | ETKRLSWRMDAKHQNVLQKFLPGRVTADGKHIQKFSET | |
| | | ARVPFYDKTQKHFDILDEQEIAGEKPVRMWVKRFIKRL | |
| | | SLVDPAKHPQKKQDNKWKRRKEGIATFIEQKNGSYYFN | |
| | | VVTNNGCTSFHLWHKPDNFDQEKLEGIQNGEKLDCWVR | |
| | | DSRYQKAFQEIPENDPDGWECKEGYLHVVGPSKVEFSD | |
| | | KKGDVINNFQGTLPSVPNDWKTIRTNDFKNRKRKNEPV | |
| | | FCCEDDKGNYYTMAKYCETFFFDLKENEEYEIPEKARI | |
| | | KYKELLRVYNNNPQAVPESVFQSRVARENVEKLKSGDL | |
| | | VYFKHNEKYVEDIVPVRISRTVDDRMIGKRMSADLRPC | |
| | | HGDWVEDGDLSALNAYPEKRLLLRHPKGLCPACRLFGT | |
| | | GSYKGRVRFGFASLENDPEWLIPGKNPGDPFHGGPVML | |
| | | SLLERPRPTWSIPGSDNKFKVPGRKFYVHHHAWKTIKD | |
| | | GNHPTTGKAIEQSPNNRTVEALAGGNSFSFEIAFENLK | |
| | | EWELGLLIHSLQLEKGLAHKLGMAKSMGFGSVEIDVES | |
| | | VRLRKDWKQWRNGNSEIPNWLGKGFAKLKEWFRDELDF | |
| | | IENLKKLLWFPEGDQAPRVCYPMLRKKDDPNGNSGYEE | |
| | | LKRGEFKKEDRQKKLTTPWTPWAKRTADGSEFESPKKK | |
| | | RKV | |
| 494 | double | MKRTADGSEFESPKKKRKVTTTMKISIEFLEPFRMTKW | 1762 |
| | mutant | QESTRRNKNNKEFVRGQAFARWHRNKKDNTKGRPYITG | |
| | fusion | TLLRSAVIRSAENLLTLSDGKISEKTCCPGKFDTEDKD | |
| | 1 | RLLQLRQRSTLRWTDKNPCPDNAETYCPFCELLGRSGN | |
| | | DGKKAEKKDWRFRIHFGNLSLPGKPDFDGPKAIGSQRV | |
| | | LNRVDFKSGKAHDFFKAYEVDHTRFPRFEGEITIDNKV | |
| | | SAEARKLLCDSLKFTDRLCGALCVIRFDEYTPAADSGK | |
| | | QTENVQAEPNANLAEKTAEQIISILDDNKKTEYTRLLA | |
| | | DAIRSLRRSSKLVAGLPKDHDGKDDHYLWDIGKKKKDE | |
| | | NSVTIRQILTTSADTKELKNAGKWREFCEKLGEALYLK | |
| | | SKDMSGGLKITRRILGDAEFHGKPDRLEKSRSVSIGSV | |
| | | LKETVVCGELVAKTPFFFGAIDEDAKQTDLQVLLTPDN | |
| | | KYRLPRSAVRGILRRDLQTYFDSPCNAELGGRPCMCKT | |
| | | CRIMRGITVMDARSEYNAPPEIRHRTRINPFTGTVAEG | |
| | | ALFNMEVAPEGIVFPFQLRYRGSEDGLPDALKTVLKWW | |
| | | AEGQAFMSGAASTGKGRFRMENAKYETLDLSDENQRND | |
| | | YLKNWGWRDEKGLEELKKRLNSGLPEPGNYRDPKWHEI | |
| | | NVSIEMASPFINGDPIRAAVDKRGTDVVTFVKYKAEGE | |
| | | EAKPVCAYKAESFRGVIRSAVARIHMEDGVPLTELTHS | |
| | | DCECLLCQIFGSEYEAGKIRFEDLVFESDPEPVTFDHV | |
| | | AIDRFTGGAADKKKFDDSPLPGSPARPLMLKGSFWIRR | |
| | | DVLEDEEYCKALGKALADVNNGLYPLGGKSAIGYGQVK | |
| | | SLGIKGDDKRISRLMNPAFDETDVAVPEKPKTDAEVRI | |
| | | EAEKVYYPHYFVEPHKKVEREEKPCGHQKFHEGRLTGK | |
| | | IRCKLITKTPLIVPDTSNDDFFRPADKEARKEKDEYHK | |
| | | SYAFFRLHKQIMIPGSELRGMVSSVYETVTNSCFRIFD | |
| | | ETKRLSWRMDADHQNVLQKFLPGRVTADGKHIQKFSET | |
| | | ARVPFYDKTQKHFDILDEQEIAGEKPVRMWVKRFIKRL | |
| | | SLVDPAKHPQKKQDNKWKRRKEGIATFIEQKNGSYYFN | |
| | | VVTNNGCTSFHLWHKPDNFDQEKLEGIQNGEKLDCWVR | |
| | | DSRYQKAFQEIPENDPDGWECKEGYLHVVGPSKVEFSD | |
| | | KKGDVINNFQGTLPSVPNDWKTIRTNDFKNRKRKNEPV | |
| | | FCCEDDKGNYYTMAKYCETFFFDLKENEEYEIPEKARI | |
| | | KYKELLRVYNNNPQAVPESVFQSRVARENVEKLKSGDL | |
| | | VYFKHNEKYVEDIVPVRISRTVDDRMIGKRMSADLRPC | |
| | | HGDWVEDGDLSALNAYPEKRLLLRHPKGLCPACRLFGT | |
| | | GSYKGRVRFGFASLENDPEWLIPGKNPGDPFHGGPVML | |
| | | SLLERPRPTWSIPGSDNKFKVPGRKFYVHHHAWKTIKD | |
| | | GNHPTTGKAIEQSPNNRTVEALAGGNSESFEIAFENLK | |
| | | EWELGLLIHSLQLEKGLAHKLGMAKSMGFGSVEIDVES | |
| | | VRLRKDWKQWRNGNSEIPNWLGKGFAKLKEWFRDELDF | |
| | | IENLKKLLWFPEGDQAPRVCYPMLRKKDDPNGNSGYEE | |
| | | LKRGEFKKEDRQKKLTTPWTPWAMAMQAAKRANIRLPP | |
| | | EVNRILYIRNLPYKITAEEMYDIFGKYGPIRQIRVGNT | |
| | | PETRGTAYVVYEDIFDAKNACDHLSGFNVCNRYLVVLY | |
| | | YNANRAFQKMDTKKKEEQLKLLKEKYGINTDPPKKRTA | |
| | | DGSEFESPKKKRKV | |
| 495 | triple | MKRTADGSEFESPKKKRKVTTTMKISIEFLEPFRMTKW | 2112 |
| | mutant | QESTRRNKNNKEFVRGQAFARWHRNKKDNTKGRPYITG | |
| | fusion | TLLRSAVIRSAENLLTLSDGKISEKTCCPGKFDTEDKD | |
| | 1 | RLLQLRQRSTLRWTDKNPCPDNAETYCPFCELLGRSGN | |
| | | DGKKAEKKDWRFRIHFGNLSLPGKPDFDGPKAIGSQRV | |
| | | LNRVDFKSGKAHDFFKAYEVDHTRFPRFEGEITIDNKV | |
| | | SAEARKLLCDSLKFTDRLCGALCVIRFDEYTPAADSGK | |
| | | QTENVQAEPNANLAEKTAEQIISILDDNKKTEYTRLLA | |
| | | DAIRSLRRSSKLVAGLPKDHDGKDDHYLWDIGKKKKDE | |
| | | NSVTIRQILTTSADTKELKNAGKWREFCEKLGEALYLK | |
| | | SKDMSGGLKITRRILGDAEFHGKPDRLEKSRSVSIGSV | |
| | | LKETVVCGELVAKTPFFFGAIDEDAKQTDLQVLLTPDN | |
| | | KYRLPRSAVRGILRRDLQTYFDSPCNAELGGRPCMCKT | |
| | | CRIMRGITVMDARSEYNAPPEIRHRTRINPFTGTVAEG | |
| | | ALFNMEVAPEGIVEPFQLRYRGSEDGLPDALKTVLKWW | |
| | | AEGQAFMSGAASTGKGRFRMENAKYETLDLSDENQRND | |
| | | YLKNWGWRDEKGLEELKKRLNSGLPEPGNYRDPKWHEI | |
| | | NVSIEMASPFINGDPIRAAVDKRGTDVVTFVKYKAEGE | |
| | | EAKPVCAYKAESFRGVIRSAVARIHMEDGVPLTELTHS | |
| | | DCECLLCQIFGSEYEAGKIRFEDLVFESDPEPVTFDHV | |
| | | AIDRFTGGAADKKKFDDSPLPGSPARPLMLKGSFWIRR | |
| | | DVLEDEEYCKALGKALADVNNGLYPLGGKSAIGYGQVK | |
| | | SLGIKGDDKRISRLMNPAFDETDVAVPEKPKTDAEVRI | |
| | | EAEKVYYPHYFVEPHKKVEREEKPCGHQKFHEGRLTGK | |
| | | IRCKLITKTPLIVPDTSNDDFFRPADKEARKEKDEYHK | |
| | | SYAFFRLHKQIMIPGSELRGMVSSVYETVTNSCFRIFD | |
| | | ETKRLSWRMDADHQNVLQKFLPGRVTADGKHIQKFSET | |
| | | ARVPFYDKTQKHFDILDEQEIAGEKPVRMWVKRFIKRL | |
| | | SLVDPAKHPQKKQDNKWKRRKEGIATFIEQKNGSYYFN | |
| | | VVTNNGCTSFHLWHKPDNFDQEKLEGIQNGEKLDCWVR | |
| | | DSRYQKAFQEIPENDPDGWECKEGYLHVVGPSKVEFSD | |
| | | KKGDVINNFQGTLPSVPNDWKTIRTNDFKNRKRKNEPV | |
| | | FCCEDDKGNYYTMAKYCETFFFDLKENEEYEIPEKARI | |
| | | KYKELLRVYNNNPQAVPESVFQSRVARENVEKLKSGDL | |
| | | VYFKHNEKYVEDIVPVRISRTVDDRMIGKRMSADLRPC | |
| | | HGDWVEDGDLSALNAYPEKRLLLRHPKGLCPACRLFGT | |
| | | GSYKGRVRFGFASLENDPEWLIPGKNPGDPFHGGPVML | |
| | | SLLERPRPTWSIPGSDNKFKVPGRKFYVHHHAWKTIKD | |
| | | GNHPTTGKAIEQSPNNRTVEALAGGNSFSFEIAFENLK | |
| | | EWELGLLIHSLQLEKGLAHKLGMAKSMGFGSVEIDVES | |
| | | VRLRKDWKQWRNGNSEIPNWLGKGFAKLKEWFRDELDF | |
| | | IENLKKLLWFPEGDQAPRVCYPMLRKKDDPNGNSGYEE | |
| | | LKRGEFKKEDRQKKLTTPWTPWAMSDFDEFERQLNENK | |
| | | QERDKENRHRKRSHSRSRSRDRKRRSRSRDRRNRDQRS | |
| | | ASRDRRRRSKPLTRGAKEEHGGLIRSPRHEKKKKVRKY | |
| | | WDVPPPGFEHITPMQYKAMQAAGQIPATALLPTMTPDG | |
| | | LAVTPTPVPVVGSQMTRQARRLYVGNIPFGITEEAMMD | |
| | | FFNAQMRLGGLTQAPGNPVLAVQINQDKNFAFLEFRSV | |
| | | DETTQAMAFDGIIFQGQSLKIRRPHDYQPLPGMSENPS | |
| | | VYVPGVVSTVVPDSAHKLFIGGLPNYLNDDQVKELLTS | |
| | | FGPLKAFNLVKDSATGLSKGYAFCEYVDINVTDQAIAG | |
| | | LNGMQLGDKKLLVQRASVGAKNATLVSPPSTINQTPVT | |
| | | LQVPGLMSSQVQMGGHPTEVLCLMNMVLPEELLDDEEY | |
| | | EEIVEDVRDECSKYGLVKSIEIPRPVDGVEVPGCGKIF | |
| | | VEFTSVFDCQKAMQGLTGRKFANRVVVTKYCDPDSYHR | |
| | | RDFWKRTADGSEFESPKKKRKV | |
| 496 | double | MKRTADGSEFESPKKKRKVTTTMKISIEFLEPFRMTKW | 1762 |
| | mutant | QESTRRNKNNKEFVRGQAFARWHRNKKDNTKGRPYITG | |
| | fusion | TLLRSAVIRSAENLLTLSDGKISEKTCCPGKFDTEDKD | |
| | 2 | RLLQLRQRSTLRWTDKNPCPDNAETYCPFCELLGRSGN | |
| | | DGKKAEKKDWRFRIHFGNLSLPGKPDFDGPKAIGSQRV | |
| | | LNRVDFKSGKAHDFFKAYEVDHTRFPRFEGEITIDNKV | |
| | | SAEARKLLCDSLKFTDRLCGALCVIRFDEYTPAADSGK | |
| | | QTENVQAEPNANLAEKTAEQIISILDDNKKTEYTRLLA | |
| | | DAIRSLRRSSKLVAGLPKDHDGKDDHYLWDIGKKKKDE | |
| | | NSVTIRQILTTSADTKELKNAGKWREFCEKLGEALYLK | |
| | | SKDMSGGLKITRRILGDAEFHGKPDRLEKSRSVSIGSV | |
| | | LKETVVCGELVAKTPFFFGAIDEDAKQTDLQVLLTPDN | |
| | | KYRLPRSAVRGILRRDLQTYFDSPCNAELGGRPCMCKT | |
| | | CRIMRGITVMDARSEYNAPPEIRHRTRINPFTGTVAEG | |
| | | ALFNMEVAPEGIVFPFQLRYRGSEDGLPDALKTVLKWW | |
| | | AEGQAFMSGAASTGKGRFRMENAKYETLDLSDENQRND | |
| | | YLKNWGWRDEKGLEELKKRLNSGLPEPGNYRDPKWHEI | |
| | | NVSIEMASPFINGDPIRAAVDKRGTDVVTFVKYKAEGE | |
| | | EAKPVCAYKAESFRGVIRSAVARIHMEDGVPLTELTHS | |
| | | DCECLLCQIFGSEYEAGKIRFEDLVFESDPEPVTFDHV | |
| | | AIDRFTGGAADKKKFDDSPLPGSPARPLMLKGSFWIRR | |
| | | DVLEDEEYCKALGKALADVNNGLYPLGGKSAIGYGQVK | |
| | | SLGIKGDDKRISRLMNPAFDETDVAVPEKPKTDAEVRI | |
| | | EAEKVYYPHYFVEPHKKVEREEKPCGHQKFHEGRLTGK | |
| | | IRCKLITKTPLIVPDTSNDDFFRPADKEARKEKDEYHK | |
| | | SYAFFRLHKQIMIPGSELRGMVSSVYETVTNSCFRIFD | |
| | | ETKRLSWRMDAKHQNVLQKFLPGRVTADGKHIQKFSET | |
| | | ARVPFYDKTQKHFDILDEQEIAGEKPVRMWVKRFIKRL | |
| | | SLVDPAKHPQKKQDNKWKRRKEGIATFIEQKNGSYYFN | |
| | | VVTNNGCTSFHLWHKPDNFDQEKLEGIQNGEKLDCWVR | |
| | | DSRYQKAFQEIPENDPDGWECKEGYLHVVGPSKVEFSD | |
| | | KKGDVINNFQGTLPSVPNDWKTIRTNDFKNRKRKNEPV | |
| | | FCCEDDKGNYYTMAKYCETFFFDLKENEEYEIPEKARI | |
| | | KYKELLRVYNNNPQAVPESVFQSRVARENVEKLKSGDL | |
| | | VYFKHNEKYVEDIVPVRISRTVDDRMIGKRMSADLRPC | |
| | | HGDWVEDGDLSALNAYPEKRLLLRHPKGLCPACRLFGT | |
| | | GSYKGRVRFGFASLENDPEWLIPGKNPGDPFHGGPVML | |
| | | SLLERPRPTWSIPGSDNKFKVPGRKFYVHHHAWKTIKD | |
| | | GNHPTTGKAIEQSPNNRTVEALAGGNSFSFEIAFENLK | |
| | | EWELGLLIHSLQLEKGLAHKLGMAKSMGFGSVEIDVES | |
| | | VRLRKDWKQWRNGNSEIPNWLGKGFAKLKEWFRDELDF | |
| | | IENLKKLLWFPEGDQAPRVCYPMLRKKDDPNGNSGYEE | |
| | | LKRGEFKKEDRQKKLTTPWTPWAMAMQAAKRANIRLPP | |
| | | EVNRILYIRNLPYKITAEEMYDIFGKYGPIRQIRVGNT | |
| | | PETRGTAYVVYEDIFDAKNACDHLSGFNVCNRYLVVLY | |
| | | YNANRAFQKMDTKKKEEQLKLLKEKYGINTDPPKKRTA | |
| | | DGSEFESPKKKRKV | |
| 497 | triple | MKRTADGSEFESPKKKRKVTTTMKISIEFLEPFRMTKW | 2112 |
| | mutant | QESTRRNKNNKEFVRGQAFARWHRNKKDNTKGRPYITG | |
| | fusion | TLLRSAVIRSAENLLTLSDGKISEKTCCPGKFDTEDKD | |
| | 2 | RLLQLRQRSTLRWTDKNPCPDNAETYCPFCELLGRSGN | |
| | | DGKKAEKKDWRFRIHFGNLSLPGKPDFDGPKAIGSQRV | |
| | | LNRVDFKSGKAHDFFKAYEVDHTRFPRFEGEITIDNKV | |
| | | SAEARKLLCDSLKFTDRLCGALCVIRFDEYTPAADSGK | |
| | | QTENVQAEPNANLAEKTAEQIISILDDNKKTEYTRLLA | |
| | | DAIRSLRRSSKLVAGLPKDHDGKDDHYLWDIGKKKKDE | |
| | | NSVTIRQILTTSADTKELKNAGKWREFCEKLGEALYLK | |
| | | SKDMSGGLKITRRILGDAEFHGKPDRLEKSRSVSIGSV | |
| | | LKETVVCGELVAKTPFFFGAIDEDAKQTDLQVLLTPDN | |
| | | KYRLPRSAVRGILRRDLQTYFDSPCNAELGGRPCMCKT | |
| | | CRIMRGITVMDARSEYNAPPEIRHRTRINPFTGTVAEG | |
| | | ALFNMEVAPEGIVFPFQLRYRGSEDGLPDALKTVLKWW | |
| | | AEGQAFMSGAASTGKGRFRMENAKYETLDLSDENQRND | |
| | | YLKNWGWRDEKGLEELKKRLNSGLPEPGNYRDPKWHEI | |
| | | NVSIEMASPFINGDPIRAAVDKRGTDVVTFVKYKAEGE | |
| | | EAKPVCAYKAESFRGVIRSAVARIHMEDGVPLTELTHS | |
| | | DCECLLCQIFGSEYEAGKIRFEDLVFESDPEPVTFDHV | |
| | | AIDRFTGGAADKKKFDDSPLPGSPARPLMLKGSFWIRR | |
| | | DVLEDEEYCKALGKALADVNNGLYPLGGKSAIGYGQVK | |
| | | SLGIKGDDKRISRLMNPAFDETDVAVPEKPKTDAEVRI | |
| | | EAEKVYYPHYFVEPHKKVEREEKPCGHQKFHEGRLTGK | |
| | | IRCKLITKTPLIVPDTSNDDFFRPADKEARKEKDEYHK | |
| | | SYAFFRLHKQIMIPGSELRGMVSSVYETVTNSCFRIFD | |
| | | ETKRLSWRMDAKHQNVLQKFLPGRVTADGKHIQKFSET | |
| | | ARVPFYDKTQKHFDILDEQEIAGEKPVRMWVKRFIKRL | |
| | | SLVDPAKHPQKKQDNKWKRRKEGIATFIEQKNGSYYFN | |
| | | VVTNNGCTSFHLWHKPDNFDQEKLEGIQNGEKLDCWVR | |
| | | DSRYQKAFQEIPENDPDGWECKEGYLHVVGPSKVEFSD | |
| | | KKGDVINNFQGTLPSVPNDWKTIRTNDFKNRKRKNEPV | |
| | | FCCEDDKGNYYTMAKYCETFFFDLKENEEYEIPEKARI | |
| | | KYKELLRVYNNNPQAVPESVFQSRVARENVEKLKSGDL | |
| | | VYFKHNEKYVEDIVPVRISRTVDDRMIGKRMSADLRPC | |
| | | HGDWVEDGDLSALNAYPEKRLLLRHPKGLCPACRLFGT | |
| | | GSYKGRVRFGFASLENDPEWLIPGKNPGDPFHGGPVML | |
| | | SLLERPRPTWSIPGSDNKFKVPGRKFYVHHHAWKTIKD | |
| | | GNHPTTGKAIEQSPNNRTVEALAGGNSFSFEIAFENLK | |
| | | EWELGLLIHSLQLEKGLAHKLGMAKSMGFGSVEIDVES | |
| | | VRLRKDWKQWRNGNSEIPNWLGKGFAKLKEWFRDELDF | |
| | | IENLKKLLWFPEGDQAPRVCYPMLRKKDDPNGNSGYEE | |
| | | LKRGEFKKEDRQKKLTTPWTPWAMSDFDEFERQLNENK | |
| | | QERDKENRHRKRSHSRSRSRDRKRRSRSRDRRNRDQRS | |
| | | ASRDRRRRSKPLTRGAKEEHGGLIRSPRHEKKKKVRKY | |
| | | WDVPPPGFEHITPMQYKAMQAAGQIPATALLPTMTPDG | |
| | | LAVTPTPVPVVGSQMTRQARRLYVGNIPFGITEEAMMD | |
| | | FFNAQMRLGGLTQAPGNPVLAVQINQDKNFAFLEFRSV | |
| | | DETTQAMAFDGIIFQGQSLKIRRPHDYQPLPGMSENPS | |
| | | VYVPGVVSTVVPDSAHKLFIGGLPNYLNDDQVKELLTS | |
| | | FGPLKAFNLVKDSATGLSKGYAFCEYVDINVTDQAIAG | |
| | | LNGMQLGDKKLLVQRASVGAKNATLVSPPSTINQTPVT | |
| | | LQVPGLMSSQVQMGGHPTEVLCLMNMVLPEELLDDEEY | |
| | | EEIVEDVRDECSKYGLVKSIEIPRPVDGVEVPGCGKIF | |
| | | VEFTSVFDCQKAMQGLTGRKFANRVVVTKYCDPDSYHR | |
| | | RDFWKRTADGSEFESPKKKRKV | |
| 498 | RBM17 | MKRTADGSEFESPKKKRKVMSLYDDLGVETSDSKTEGW | 2038 |
| | Direct_ | SKNFKLLQSQLQVKKAALTQAKSQRTKQSTVLAPVIDL | |
| | Nt | KRGGSSDDRQIVDTPPHVAAGLKDPVPSGFSAGEVLIP | |
| | | LADEYDPMFPNDYEKVVKRQREERQRQRELERQKEIEE | |
| | | REKRRKDRHEASGFARRPDPDSDEDEDYERERRKRSMG | |
| | | GAAIAPPTSLVEKDKELPRDFPYEEDSRPRSQSSKAAI | |
| | | PPPVYEEQDRPRSPTGPSNSFLANMGGTVAHKIMQKYG | |
| | | FREGQGLGKHEQGLSTALSVEKTSKRGGKIIVGDATEK | |
| | | DASKKSDSNPLTEILKCPTKVVLLRNMVGAGEVDEDLE | |
| | | VETKEECEKYGKVGKCVIFEIPGAPDDEAVRIFLEFER | |
| | | VESAIKAVVDLNGRYFGGRVVKACFYNLDKFRVLDLAE | |
| | | QVTTTMKISIEFLEPFRMTKWQESTRRNKNNKEFVRGQ | |
| | | AFARWHRNKKDNTKGRPYITGTLLRSAVIRSAENLLTL | |
| | | SDGKISEKTCCPGKFDTEDKDRLLQLRQRSTLRWTDKN | |
| | | PCPDNAETYCPFCELLGRSGNDGKKAEKKDWRFRIHFG | |
| | | NLSLPGKPDFDGPKAIGSQRVLNRVDFKSGKAHDFFKA | |
| | | YEVDHTRFPRFEGEITIDNKVSAEARKLLCDSLKFTDR | |
| | | LCGALCVIRFDEYTPAADSGKQTENVQAEPNANLAEKT | |
| | | AEQIISILDDNKKTEYTRLLADAIRSLRRSSKLVAGLP | |
| | | KDHDGKDDHYLWDIGKKKKDENSVTIRQILTTSADTKE | |
| | | LKNAGKWREFCEKLGEALYLKSKDMSGGLKITRRILGD | |
| | | AEFHGKPDRLEKSRSVSIGSVLKETVVCGELVAKTPFF | |
| | | FGAIDEDAKQTDLQVLLTPDNKYRLPRSAVRGILRRDL | |
| | | QTYFDSPCNAELGGRPCMCKTCRIMRGITVMDARSEYN | |
| | | APPEIRHRTRINPFTGTVAEGALFNMEVAPEGIVFPFQ | |
| | | LRYRGSEDGLPDALKTVLKWWAEGQAFMSGAASTGKGR | |
| | | FRMENAKYETLDLSDENQRNDYLKNWGWRDEKGLEELK | |
| | | KRLNSGLPEPGNYRDPKWHEINVSIEMASPFINGDPIR | |
| | | AAVDKRGTDVVTFVKYKAEGEEAKPVCAYKAESFRGVI | |
| | | RSAVARIHMEDGVPLTELTHSDCECLLCQIFGSEYEAG | |
| | | KIRFEDLVFESDPEPVTFDHVAIDRFTGGAADKKKFDD | |
| | | SPLPGSPARPLMLKGSFWIRRDVLEDEEYCKALGKALA | |
| | | DVNNGLYPLGGKSAIGYGQVKSLGIKGDDKRISRLMNP | |
| | | AFDETDVAVPEKPKTDAEVRIEAEKVYYPHYFVEPHKK | |
| | | VEREEKPCGHQKFHEGRLTGKIRCKLITKTPLIVPDTS | |
| | | NDDFFRPADKEARKEKDEYHKSYAFFRLHKQIMIPGSE | |
| | | LRGMVSSVYETVTNSCFRIFDETKRLSWRMDADHQNVL | |
| | | QDFLPGRVTADGKHIQKFSETARVPFYDKTQKHFDILD | |
| | | EQEIAGEKPVRMWVKRFIKRLSLVDPAKHPQKKQDNKW | |
| | | KRRKEGIATFIEQKNGSYYFNVVTNNGCTSFHLWHKPD | |
| | | NFDQEKLEGIQNGEKLDCWVRDSRYQKAFQEIPENDPD | |
| | | GWECKEGYLHVVGPSKVEFSDKKGDVINNFQGTLPSVP | |
| | | NDWKTIRTNDFKNRKRKNEPVFCCEDDKGNYYTMAKYC | |
| | | ETFFFDLKENEEYEIPEKARIKYKELLRVYNNNPQAVP | |
| | | ESVFQSRVARENVEKLKSGDLVYFKHNEKYVEDIVPVR | |
| | | ISRTVDDRMIGKRMSADLRPCHGDWVEDGDLSALNAYP | |
| | | EKRLLLRHPKGLCPACRLFGTGSYKGRVRFGFASLEND | |
| | | PEWLIPGKNPGDPFHGGPVMLSLLERPRPTWSIPGSDN | |
| | | KFKVPGRKFYVHHHAWKTIKDGNHPTTGKAIEQSPNNR | |
| | | TVEALAGGNSFSFEIAFENLKEWELGLLIHSLQLEKGL | |
| | | AHKLGMAKSMGFGSVEIDVESVRLRKDWKQWRNGNSEI | |
| | | PNWLGKGFAKLKEWFRDELDFIENLKKLLWFPEGDQAP | |
| | | RVCYPMLRKKDDPNGNSGYEELKDGEFKKEDRQKKLTT | |
| | | PWTPWAKRTADGSEFESPKKKRKV | |
| 499 | RBM17 | MKRTADGSEFESPKKKRKVTTTMKISIEFLEPFRMTKW | 2038 |
| | Direct_ | QESTRRNKNNKEFVRGQAFARWHRNKKDNTKGRPYITG | |
| | Ct | TLLRSAVIRSAENLLTLSDGKISEKTCCPGKFDTEDKD | |
| | | RLLQLRQRSTLRWTDKNPCPDNAETYCPFCELLGRSGN | |
| | | DGKKAEKKDWRFRIHFGNLSLPGKPDFDGPKAIGSQRV | |
| | | LNRVDFKSGKAHDFFKAYEVDHTRFPRFEGEITIDNKV | |
| | | SAEARKLLCDSLKFTDRLCGALCVIRFDEYTPAADSGK | |
| | | QTENVQAEPNANLAEKTAEQIISILDDNKKTEYTRLLA | |
| | | DAIRSLRRSSKLVAGLPKDHDGKDDHYLWDIGKKKKDE | |
| | | NSVTIRQILTTSADTKELKNAGKWREFCEKLGEALYLK | |
| | | SKDMSGGLKITRRILGDAEFHGKPDRLEKSRSVSIGSV | |
| | | LKETVVCGELVAKTPFFFGAIDEDAKQTDLQVLLTPDN | |
| | | KYRLPRSAVRGILRRDLQTYFDSPCNAELGGRPCMCKT | |
| | | CRIMRGITVMDARSEYNAPPEIRHRTRINPFTGTVAEG | |
| | | ALFNMEVAPEGIVFPFQLRYRGSEDGLPDALKTVLKWW | |
| | | AEGQAFMSGAASTGKGRFRMENAKYETLDLSDENQRND | |
| | | YLKNWGWRDEKGLEELKKRLNSGLPEPGNYRDPKWHEI | |
| | | NVSIEMASPFINGDPIRAAVDKRGTDVVTFVKYKAEGE | |
| | | EAKPVCAYKAESFRGVIRSAVARIHMEDGVPLTELTHS | |
| | | DCECLLCQIFGSEYEAGKIRFEDLVFESDPEPVTFDHV | |
| | | AIDRFTGGAADKKKFDDSPLPGSPARPLMLKGSFWIRR | |
| | | DVLEDEEYCKALGKALADVNNGLYPLGGKSAIGYGQVK | |
| | | SLGIKGDDKRISRLMNPAFDETDVAVPEKPKTDAEVRI | |
| | | EAEKVYYPHYFVEPHKKVEREEKPCGHQKFHEGRLTGK | |
| | | IRCKLITKTPLIVPDTSNDDFFRPADKEARKEKDEYHK | |
| | | SYAFFRLHKQIMIPGSELRGMVSSVYETVTNSCFRIFD | |
| | | ETKRLSWRMDADHQNVLQDFLPGRVTADGKHIQKFSET | |
| | | ARVPFYDKTQKHFDILDEQEIAGEKPVRMWVKRFIKRL | |
| | | SLVDPAKHPQKKQDNKWKRRKEGIATFIEQKNGSYYFN | |
| | | VVTNNGCTSFHLWHKPDNFDQEKLEGIQNGEKLDCWVR | |
| | | DSRYQKAFQEIPENDPDGWECKEGYLHVVGPSKVEFSD | |
| | | KKGDVINNFQGTLPSVPNDWKTIRTNDFKNRKRKNEPV | |
| | | FCCEDDKGNYYTMAKYCETFFFDLKENEEYEIPEKARI | |
| | | KYKELLRVYNNNPQAVPESVFQSRVARENVEKLKSGDL | |
| | | VYFKHNEKYVEDIVPVRISRTVDDRMIGKRMSADLRPC | |
| | | HGDWVEDGDLSALNAYPEKRLLLRHPKGLCPACRLFGT | |
| | | GSYKGRVRFGFASLENDPEWLIPGKNPGDPFHGGPVML | |
| | | SLLERPRPTWSIPGSDNKFKVPGRKFYVHHHAWKTIKD | |
| | | GNHPTTGKAIEQSPNNRTVEALAGGNSFSFEIAFENLK | |
| | | EWELGLLIHSLQLEKGLAHKLGMAKSMGFGSVEIDVES | |
| | | VRLRKDWKQWRNGNSEIPNWLGKGFAKLKEWFRDELDF | |
| | | IENLKKLLWFPEGDQAPRVCYPMLRKKDDPNGNSGYEE | |
| | | LKDGEFKKEDRQKKLTTPWTPWAMSLYDDLGVETSDSK | |
| | | TEGWSKNFKLLQSQLQVKKAALTQAKSQRTKQSTVLAP | |
| | | VIDLKRGGSSDDRQIVDTPPHVAAGLKDPVPSGFSAGE | |
| | | VLIPLADEYDPMFPNDYEKVVKRQREERQRQRELERQK | |
| | | EIEEREKRRKDRHEASGFARRPDPDSDEDEDYERERRK | |
| | | RSMGGAAIAPPTSLVEKDKELPRDFPYEEDSRPRSQSS | |
| | | KAAIPPPVYEEQDRPRSPTGPSNSFLANMGGTVAHKIM | |
| | | QKYGFREGQGLGKHEQGLSTALSVEKTSKRGGKIIVGD | |
| | | ATEKDASKKSDSNPLTEILKCPTKVVLLRNMVGAGEVD | |
| | | EDLEVETKEECEKYGKVGKCVIFEIPGAPDDEAVRIFL | |
| | | EFERVESAIKAVVDLNGRYFGGRVVKACFYNLDKFRVL | |
| | | DLAEQVKRTADGSEFESPKKKRKV | |
| 500 | RBM17 | MKRTADGSEFESPKKKRKVTTTMKISIEFLEPFRMTKW | 2053 |
| | XTENLinker_ | QESTRRNKNNKEFVRGQAFARWHRNKKDNTKGRPYITG | |
| | Ct | TLLRSAVIRSAENLLTLSDGKISEKTCCPGKFDTEDKD | |
| | | RLLQLRQRSTLRWTDKNPCPDNAETYCPFCELLGRSGN | |
| | | DGKKAEKKDWRFRIHFGNLSLPGKPDFDGPKAIGSQRV | |
| | | LNRVDFKSGKAHDFFKAYEVDHTRFPRFEGEITIDNKV | |
| | | SAEARKLLCDSLKFTDRLCGALCVIRFDEYTPAADSGK | |
| | | QTENVQAEPNANLAEKTAEQIISILDDNKKTEYTRLLA | |
| | | DAIRSLRRSSKLVAGLPKDHDGKDDHYLWDIGKKKKDE | |
| | | NSVTIRQILTTSADTKELKNAGKWREFCEKLGEALYLK | |
| | | SKDMSGGLKITRRILGDAEFHGKPDRLEKSRSVSIGSV | |
| | | LKETVVCGELVAKTPFFFGAIDEDAKQTDLQVLLTPDN | |
| | | KYRLPRSAVRGILRRDLQTYFDSPCNAELGGRPCMCKT | |
| | | CRIMRGITVMDARSEYNAPPEIRHRTRINPFTGTVAEG | |
| | | ALFNMEVAPEGIVFPFQLRYRGSEDGLPDALKTVLKWW | |
| | | AEGQAFMSGAASTGKGRFRMENAKYETLDLSDENQRND | |
| | | YLKNWGWRDEKGLEELKKRLNSGLPEPGNYRDPKWHEI | |
| | | NVSIEMASPFINGDPIRAAVDKRGTDVVTFVKYKAEGE | |
| | | EAKPVCAYKAESFRGVIRSAVARIHMEDGVPLTELTHS | |
| | | DCECLLCQIFGSEYEAGKIRFEDLVFESDPEPVTFDHV | |
| | | AIDRFTGGAADKKKFDDSPLPGSPARPLMLKGSFWIRR | |
| | | DVLEDEEYCKALGKALADVNNGLYPLGGKSAIGYGQVK | |
| | | SLGIKGDDKRISRLMNPAFDETDVAVPEKPKTDAEVRI | |
| | | EAEKVYYPHYFVEPHKKVEREEKPCGHQKFHEGRLTGK | |
| | | IRCKLITKTPLIVPDTSNDDFFRPADKEARKEKDEYHK | |
| | | SYAFFRLHKQIMIPGSELRGMVSSVYETVTNSCFRIFD | |
| | | ETKRLSWRMDADHQNVLQDFLPGRVTADGKHIQKFSET | |
| | | ARVPFYDKTQKHFDILDEQEIAGEKPVRMWVKRFIKRL | |
| | | SLVDPAKHPQKKQDNKWKRRKEGIATFIEQKNGSYYFN | |
| | | VVTNNGCTSFHLWHKPDNFDQEKLEGIQNGEKLDCWVR | |
| | | DSRYQKAFQEIPENDPDGWECKEGYLHVVGPSKVEFSD | |
| | | KKGDVINNFQGTLPSVPNDWKTIRTNDFKNRKRKNEPV | |
| | | FCCEDDKGNYYTMAKYCETFFFDLKENEEYEIPEKARI | |
| | | KYKELLRVYNNNPQAVPESVFQSRVARENVEKLKSGDL | |
| | | VYFKHNEKYVEDIVPVRISRTVDDRMIGKRMSADLRPC | |
| | | HGDWVEDGDLSALNAYPEKRLLLRHPKGLCPACRLFGT | |
| | | GSYKGRVRFGFASLENDPEWLIPGKNPGDPFHGGPVML | |
| | | SLLERPRPTWSIPGSDNKFKVPGRKFYVHHHAWKTIKD | |
| | | GNHPTTGKAIEQSPNNRTVEALAGGNSFSFEIAFENLK | |
| | | EWELGLLIHSLQLEKGLAHKLGMAKSMGFGSVEIDVES | |
| | | VRLRKDWKQWRNGNSEIPNWLGKGFAKLKEWFRDELDF | |
| | | IENLKKLLWFPEGDQAPRVCYPMLRKKDDPNGNSGYEE | |
| | | LKDGEFKKEDRQKKLTTPWTPWASGSETPGTSESATPE | |
| | | SSLYDDLGVETSDSKTEGWSKNFKLLQSQLQVKKAALT | |
| | | QAKSQRTKQSTVLAPVIDLKRGGSSDDRQIVDTPPHVA | |
| | | AGLKDPVPSGFSAGEVLIPLADEYDPMFPNDYEKVVKR | |
| | | QREERQRQRELERQKEIEEREKRRKDRHEASGFARRPD | |
| | | PDSDEDEDYERERRKRSMGGAAIAPPTSLVEKDKELPR | |
| | | DFPYEEDSRPRSQSSKAAIPPPVYEEQDRPRSPTGPSN | |
| | | SFLANMGGTVAHKIMQKYGFREGQGLGKHEQGLSTALS | |
| | | VEKTSKRGGKIIVGDATEKDASKKSDSNPLTEILKCPT | |
| | | KVVLLRNMVGAGEVDEDLEVETKEECEKYGKVGKCVIF | |
| | | EIPGAPDDEAVRIFLEFERVESAIKAVVDLNGRYFGGR | |
| | | VVKACFYNLDKFRVLDLAEQVKRTADGSEFESPKKKRK | |
| | | V | |
| 501 | SF3B6 | MKRTADGSEFESPKKKRKVMAMQAAKRANIRLPPEVNR | 1762 |
| | Direct_ | ILYIRNLPYKITAEEMYDIFGKYGPIRQIRVGNTPETR | |
| | Nt | GTAYVVYEDIFDAKNACDHLSGFNVCNRYLVVLYYNAN | |
| | | RAFQKMDTKKKEEQLKLLKEKYGINTDPPKTTTMKISI | |
| | | EFLEPFRMTKWQESTRRNKNNKEFVRGQAFARWHRNKK | |
| | | DNTKGRPYITGTLLRSAVIRSAENLLTLSDGKISEKTC | |
| | | CPGKFDTEDKDRLLQLRQRSTLRWTDKNPCPDNAETYC | |
| | | PFCELLGRSGNDGKKAEKKDWRFRIHFGNLSLPGKPDF | |
| | | DGPKAIGSQRVLNRVDFKSGKAHDFFKAYEVDHTRFPR | |
| | | FEGEITIDNKVSAEARKLLCDSLKFTDRLCGALCVIRF | |
| | | DEYTPAADSGKQTENVQAEPNANLAEKTAEQIISILDD | |
| | | NKKTEYTRLLADAIRSLRRSSKLVAGLPKDHDGKDDHY | |
| | | LWDIGKKKKDENSVTIRQILTTSADTKELKNAGKWREF | |
| | | CEKLGEALYLKSKDMSGGLKITRRILGDAEFHGKPDRL | |
| | | EKSRSVSIGSVLKETVVCGELVAKTPFFFGAIDEDAKQ | |
| | | TDLQVLLTPDNKYRLPRSAVRGILRRDLQTYFDSPCNA | |
| | | ELGGRPCMCKTCRIMRGITVMDARSEYNAPPEIRHRTR | |
| | | INPFTGTVAEGALFNMEVAPEGIVFPFQLRYRGSEDGL | |
| | | PDALKTVLKWWAEGQAFMSGAASTGKGRFRMENAKYET | |
| | | LDLSDENQRNDYLKNWGWRDEKGLEELKKRLNSGLPEP | |
| | | GNYRDPKWHEINVSIEMASPFINGDPIRAAVDKRGTDV | |
| | | VTFVKYKAEGEEAKPVCAYKAESFRGVIRSAVARIHME | |
| | | DGVPLTELTHSDCECLLCQIFGSEYEAGKIRFEDLVFE | |
| | | SDPEPVTFDHVAIDRFTGGAADKKKFDDSPLPGSPARP | |
| | | LMLKGSFWIRRDVLEDEEYCKALGKALADVNNGLYPLG | |
| | | GKSAIGYGQVKSLGIKGDDKRISRLMNPAFDETDVAVP | |
| | | EKPKTDAEVRIEAEKVYYPHYFVEPHKKVEREEKPCGH | |
| | | QKFHEGRLTGKIRCKLITKTPLIVPDTSNDDFFRPADK | |
| | | EARKEKDEYHKSYAFFRLHKQIMIPGSELRGMVSSVYE | |
| | | TVTNSCFRIFDETKRLSWRMDADHQNVLQDFLPGRVTA | |
| | | DGKHIQKFSETARVPFYDKTQKHFDILDEQEIAGEKPV | |
| | | RMWVKRFIKRLSLVDPAKHPQKKQDNKWKRRKEGIATF | |
| | | IEQKNGSYYFNVVTNNGCTSFHLWHKPDNFDQEKLEGI | |
| | | QNGEKLDCWVRDSRYQKAFQEIPENDPDGWECKEGYLH | |
| | | VVGPSKVEFSDKKGDVINNFQGTLPSVPNDWKTIRTND | |
| | | FKNRKRKNEPVFCCEDDKGNYYTMAKYCETFFFDLKEN | |
| | | EEYEIPEKARIKYKELLRVYNNNPQAVPESVFQSRVAR | |
| | | ENVEKLKSGDLVYFKHNEKYVEDIVPVRISRTVDDRMI | |
| | | GKRMSADLRPCHGDWVEDGDLSALNAYPEKRLLLRHPK | |
| | | GLCPACRLFGTGSYKGRVRFGFASLENDPEWLIPGKNP | |
| | | GDPFHGGPVMLSLLERPRPTWSIPGSDNKFKVPGRKFY | |
| | | VHHHAWKTIKDGNHPTTGKAIEQSPNNRTVEALAGGNS | |
| | | FSFEIAFENLKEWELGLLIHSLQLEKGLAHKLGMAKSM | |
| | | GFGSVEIDVESVRLRKDWKQWRNGNSEIPNWLGKGFAK | |
| | | LKEWFRDELDFIENLKKLLWFPEGDQAPRVCYPMLRKK | |
| | | DDPNGNSGYEELKDGEFKKEDRQKKLTTPWTPWAKRTA | |
| | | DGSEFESPKKKRKV | |
| 492 | SF3B6 | MKRTADGSEFESPKKKRKVTTTMKISIEFLEPFRMTKW | 1762 |
| | Direct_ | QESTRRNKNNKEFVRGQAFARWHRNKKDNTKGRPYITG | |
| | Ct | TLLRSAVIRSAENLLTLSDGKISEKTCCPGKFDTEDKD | |
| | | RLLQLRQRSTLRWTDKNPCPDNAETYCPFCELLGRSGN | |
| | | DGKKAEKKDWRFRIHFGNLSLPGKPDFDGPKAIGSQRV | |
| | | LNRVDFKSGKAHDFFKAYEVDHTRFPRFEGEITIDNKV | |
| | | SAEARKLLCDSLKFTDRLCGALCVIRFDEYTPAADSGK | |
| | | QTENVQAEPNANLAEKTAEQIISILDDNKKTEYTRLLA | |
| | | DAIRSLRRSSKLVAGLPKDHDGKDDHYLWDIGKKKKDE | |
| | | NSVTIRQILTTSADTKELKNAGKWREFCEKLGEALYLK | |
| | | SKDMSGGLKITRRILGDAEFHGKPDRLEKSRSVSIGSV | |
| | | LKETVVCGELVAKTPFFFGAIDEDAKQTDLQVLLTPDN | |
| | | KYRLPRSAVRGILRRDLQTYFDSPCNAELGGRPCMCKT | |
| | | CRIMRGITVMDARSEYNAPPEIRHRTRINPFTGTVAEG | |
| | | ALFNMEVAPEGIVFPFQLRYRGSEDGLPDALKTVLKWW | |
| | | AEGQAFMSGAASTGKGRFRMENAKYETLDLSDENQRND | |
| | | YLKNWGWRDEKGLEELKKRLNSGLPEPGNYRDPKWHEI | |
| | | NVSIEMASPFINGDPIRAAVDKRGTDVVTFVKYKAEGE | |
| | | EAKPVCAYKAESFRGVIRSAVARIHMEDGVPLTELTHS | |
| | | DCECLLCQIFGSEYEAGKIRFEDLVFESDPEPVTFDHV | |
| | | AIDRFTGGAADKKKFDDSPLPGSPARPLMLKGSFWIRR | |
| | | DVLEDEEYCKALGKALADVNNGLYPLGGKSAIGYGQVK | |
| | | SLGIKGDDKRISRLMNPAFDETDVAVPEKPKTDAEVRI | |
| | | EAEKVYYPHYFVEPHKKVEREEKPCGHQKFHEGRLTGK | |
| | | IRCKLITKTPLIVPDTSNDDFFRPADKEARKEKDEYHK | |
| | | SYAFFRLHKQIMIPGSELRGMVSSVYETVTNSCFRIFD | |
| | | ETKRLSWRMDADHQNVLQDFLPGRVTADGKHIQKFSET | |
| | | ARVPFYDKTQKHFDILDEQEIAGEKPVRMWVKRFIKRL | |
| | | SLVDPAKHPQKKQDNKWKRRKEGIATFIEQKNGSYYFN | |
| | | VVTNNGCTSFHLWHKPDNFDQEKLEGIQNGEKLDCWVR | |
| | | DSRYQKAFQEIPENDPDGWECKEGYLHVVGPSKVEFSD | |
| | | KKGDVINNFQGTLPSVPNDWKTIRTNDFKNRKRKNEPV | |
| | | FCCEDDKGNYYTMAKYCETFFFDLKENEEYEIPEKARI | |
| | | KYKELLRVYNNNPQAVPESVFQSRVARENVEKLKSGDL | |
| | | VYFKHNEKYVEDIVPVRISRTVDDRMIGKRMSADLRPC | |
| | | HGDWVEDGDLSALNAYPEKRLLLRHPKGLCPACRLFGT | |
| | | GSYKGRVRFGFASLENDPEWLIPGKNPGDPFHGGPVML | |
| | | SLLERPRPTWSIPGSDNKFKVPGRKFYVHHHAWKTIKD | |
| | | GNHPTTGKAIEQSPNNRTVEALAGGNSFSFEIAFENLK | |
| | | EWELGLLIHSLQLEKGLAHKLGMAKSMGFGSVEIDVES | |
| | | VRLRKDWKQWRNGNSEIPNWLGKGFAKLKEWFRDELDF | |
| | | IENLKKLLWFPEGDQAPRVCYPMLRKKDDPNGNSGYEE | |
| | | LKDGEFKKEDRQKKLTTPWTPWAMAMQAAKRANIRLPP | |
| | | EVNRILYIRNLPYKITAEEMYDIFGKYGPIRQIRVGNT | |
| | | PETRGTAYVVYEDIFDAKNACDHLSGFNVCNRYLVVLY | |
| | | YNANRAFQKMDTKKKEEQLKLLKEKYGINTDPPKKRTA | |
| | | DGSEFESPKKKRKV | |
| 502 | SF3B6 | MKRTADGSEFESPKKKRKVTTTMKISIEFLEPFRMTKW | 1777 |
| | XTENLinker_ | QESTRRNKNNKEFVRGQAFARWHRNKKDNTKGRPYITG | |
| | Ct | TLLRSAVIRSAENLLTLSDGKISEKTCCPGKFDTEDKD | |
| | | RLLQLRQRSTLRWTDKNPCPDNAETYCPFCELLGRSGN | |
| | | DGKKAEKKDWRFRIHFGNLSLPGKPDFDGPKAIGSQRV | |
| | | LNRVDFKSGKAHDFFKAYEVDHTRFPRFEGEITIDNKV | |
| | | SAEARKLLCDSLKFTDRLCGALCVIRFDEYTPAADSGK | |
| | | QTENVQAEPNANLAEKTAEQIISILDDNKKTEYTRLLA | |
| | | DAIRSLRRSSKLVAGLPKDHDGKDDHYLWDIGKKKKDE | |
| | | NSVTIRQILTTSADTKELKNAGKWREFCEKLGEALYLK | |
| | | SKDMSGGLKITRRILGDAEFHGKPDRLEKSRSVSIGSV | |
| | | LKETVVCGELVAKTPFFFGAIDEDAKQTDLQVLLTPDN | |
| | | KYRLPRSAVRGILRRDLQTYFDSPCNAELGGRPCMCKT | |
| | | CRIMRGITVMDARSEYNAPPEIRHRTRINPFTGTVAEG | |
| | | ALFNMEVAPEGIVFPFQLRYRGSEDGLPDALKTVLKWW | |
| | | AEGQAFMSGAASTGKGRFRMENAKYETLDLSDENQRND | |
| | | YLKNWGWRDEKGLEELKKRLNSGLPEPGNYRDPKWHEI | |
| | | NVSIEMASPFINGDPIRAAVDKRGTDVVTFVKYKAEGE | |
| | | EAKPVCAYKAESFRGVIRSAVARIHMEDGVPLTELTHS | |
| | | DCECLLCQIFGSEYEAGKIRFEDLVFESDPEPVTFDHV | |
| | | AIDRFTGGAADKKKFDDSPLPGSPARPLMLKGSFWIRR | |
| | | DVLEDEEYCKALGKALADVNNGLYPLGGKSAIGYGQVK | |
| | | SLGIKGDDKRISRLMNPAFDETDVAVPEKPKTDAEVRI | |
| | | EAEKVYYPHYFVEPHKKVEREEKPCGHQKFHEGRLTGK | |
| | | IRCKLITKTPLIVPDTSNDDFFRPADKEARKEKDEYHK | |
| | | SYAFFRLHKQIMIPGSELRGMVSSVYETVTNSCFRIFD | |
| | | ETKRLSWRMDADHQNVLQDFLPGRVTADGKHIQKFSET | |
| | | ARVPFYDKTQKHFDILDEQEIAGEKPVRMWVKRFIKRL | |
| | | SLVDPAKHPQKKQDNKWKRRKEGIATFIEQKNGSYYFN | |
| | | VVTNNGCTSFHLWHKPDNFDQEKLEGIQNGEKLDCWVR | |
| | | DSRYQKAFQEIPENDPDGWECKEGYLHVVGPSKVEFSD | |
| | | KKGDVINNFQGTLPSVPNDWKTIRTNDFKNRKRKNEPV | |
| | | FCCEDDKGNYYTMAKYCETFFFDLKENEEYEIPEKARI | |
| | | KYKELLRVYNNNPQAVPESVFQSRVARENVEKLKSGDL | |
| | | VYFKHNEKYVEDIVPVRISRTVDDRMIGKRMSADLRPC | |
| | | HGDWVEDGDLSALNAYPEKRLLLRHPKGLCPACRLFGT | |
| | | GSYKGRVRFGFASLENDPEWLIPGKNPGDPFHGGPVML | |
| | | SLLERPRPTWSIPGSDNKFKVPGRKFYVHHHAWKTIKD | |
| | | GNHPTTGKAIEQSPNNRTVEALAGGNSFSFEIAFENLK | |
| | | EWELGLLIHSLQLEKGLAHKLGMAKSMGFGSVEIDVES | |
| | | VRLRKDWKQWRNGNSEIPNWLGKGFAKLKEWFRDELDF | |
| | | IENLKKLLWFPEGDQAPRVCYPMLRKKDDPNGNSGYEE | |
| | | LKDGEFKKEDRQKKLTTPWTPWASGSETPGTSESATPE | |
| | | SAMQAAKRANIRLPPEVNRILYIRNLPYKITAEEMYDI | |
| | | FGKYGPIRQIRVGNTPETRGTAYVVYEDIFDAKNACDH | |
| | | LSGFNVCNRYLVVLYYNANRAFQKMDTKKKEEQLKLLK | |
| | | EKYGINTDPPKKRTADGSEFESPKKKRKV | |
| 503 | U2AF1 | MKRTADGSEFESPKKKRKVMAEYLASIFGTEKDKVNCS | 1877 |
| | Direct_ | FYFKIGACRHGDRCSRLHNKPTFSQTIALLNIYRNPQN | |
| | Nt | SSQSADGLRCAVSDVEMQEHYDEFFEEVETEMEEKYGE | |
| | | VEEMNVCDNLGDHLVGNVYVKFRREEDAEKAVIDLNNR | |
| | | WFNGQPIHAELSPVTDFREACCRQYEMGECTRGGFCNF | |
| | | MHLKPISRELRRELYGRRRKKHRSRSRSRERRSRSRDR | |
| | | GRGGGGGGGGGGGGRERDRRRSRDRERSGRFTTTMKIS | |
| | | IEFLEPFRMTKWQESTRRNKNNKEFVRGQAFARWHRNK | |
| | | KDNTKGRPYITGTLLRSAVIRSAENLLTLSDGKISEKT | |
| | | CCPGKFDTEDKDRLLQLRQRSTLRWTDKNPCPDNAETY | |
| | | CPFCELLGRSGNDGKKAEKKDWRFRIHFGNLSLPGKPD | |
| | | FDGPKAIGSQRVLNRVDFKSGKAHDFFKAYEVDHTRFP | |
| | | RFEGEITIDNKVSAEARKLLCDSLKFTDRLCGALCVIR | |
| | | FDEYTPAADSGKQTENVQAEPNANLAEKTAEQIISILD | |
| | | DNKKTEYTRLLADAIRSLRRSSKLVAGLPKDHDGKDDH | |
| | | YLWDIGKKKKDENSVTIRQILTTSADTKELKNAGKWRE | |
| | | FCEKLGEALYLKSKDMSGGLKITRRILGDAEFHGKPDR | |
| | | LEKSRSVSIGSVLKETVVCGELVAKTPFFFGAIDEDAK | |
| | | QTDLQVLLTPDNKYRLPRSAVRGILRRDLQTYFDSPCN | |
| | | AELGGRPCMCKTCRIMRGITVMDARSEYNAPPEIRHRT | |
| | | RINPFTGTVAEGALFNMEVAPEGIVFPFQLRYRGSEDG | |
| | | LPDALKTVLKWWAEGQAFMSGAASTGKGRFRMENAKYE | |
| | | TLDLSDENQRNDYLKNWGWRDEKGLEELKKRLNSGLPE | |
| | | PGNYRDPKWHEINVSIEMASPFINGDPIRAAVDKRGTD | |
| | | VVTFVKYKAEGEEAKPVCAYKAESFRGVIRSAVARIHM | |
| | | EDGVPLTELTHSDCECLLCQIFGSEYEAGKIRFEDLVF | |
| | | ESDPEPVTFDHVAIDRFTGGAADKKKFDDSPLPGSPAR | |
| | | PLMLKGSFWIRRDVLEDEEYCKALGKALADVNNGLYPL | |
| | | GGKSAIGYGQVKSLGIKGDDKRISRLMNPAFDETDVAV | |
| | | PEKPKTDAEVRIEAEKVYYPHYFVEPHKKVEREEKPCG | |
| | | HQKFHEGRLIGKIRCKLITKTPLIVPDTSNDDFFRPAD | |
| | | KEARKEKDEYHKSYAFFRLHKQIMIPGSELRGMVSSVY | |
| | | ETVTNSCFRIFDETKRLSWRMDADHQNVLQDFLPGRVT | |
| | | ADGKHIQKFSETARVPFYDKTQKHFDILDEQEIAGEKP | |
| | | VRMWVKRFIKRLSLVDPAKHPQKKQDNKWKRRKEGIAT | |
| | | FIEQKNGSYYFNVVTNNGCTSFHLWHKPDNFDQEKLEG | |
| | | IQNGEKLDCWVRDSRYQKAFQEIPENDPDGWECKEGYL | |
| | | HVVGPSKVEFSDKKGDVINNFQGTLPSVPNDWKTIRTN | |
| | | DFKNRKRKNEPVFCCEDDKGNYYTMAKYCETFFFDLKE | |
| | | NEEYEIPEKARIKYKELLRVYNNNPQAVPESVFQSRVA | |
| | | RENVEKLKSGDLVYFKHNEKYVEDIVPVRISRTVDDRM | |
| | | IGKRMSADLRPCHGDWVEDGDLSALNAYPEKRLLLRHP | |
| | | KGLCPACRLFGTGSYKGRVRFGFASLENDPEWLIPGKN | |
| | | PGDPFHGGPVMLSLLERPRPTWSIPGSDNKFKVPGRKF | |
| | | YVHHHAWKTIKDGNHPTTGKAIEQSPNNRTVEALAGGN | |
| | | SFSFEIAFENLKEWELGLLIHSLQLEKGLAHKLGMAKS | |
| | | MGFGSVEIDVESVRLRKDWKQWRNGNSEIPNWLGKGFA | |
| | | KLKEWFRDELDFIENLKKLLWFPEGDQAPRVCYPMLRK | |
| | | KDDPNGNSGYEELKDGEFKKEDRQKKLTTPWTPWAKRT | |
| | | ADGSEFESPKKKRKV | |
| 504 | U2AF1 | MKRTADGSEFESPKKKRKVTTTMKISIEFLEPFRMTKW | 1877 |
| | Direct_ | QESTRRNKNNKEFVRGQAFARWHRNKKDNTKGRPYITG | |
| | Ct | TLLRSAVIRSAENLLTLSDGKISEKTCCPGKFDTEDKD | |
| | | RLLQLRQRSTLRWTDKNPCPDNAETYCPFCELLGRSGN | |
| | | DGKKAEKKDWRFRIHFGNLSLPGKPDFDGPKAIGSQRV | |
| | | LNRVDFKSGKAHDFFKAYEVDHTRFPRFEGEITIDNKV | |
| | | SAEARKLLCDSLKFTDRLCGALCVIRFDEYTPAADSGK | |
| | | QTENVQAEPNANLAEKTAEQIISILDDNKKTEYTRLLA | |
| | | DAIRSLRRSSKLVAGLPKDHDGKDDHYLWDIGKKKKDE | |
| | | NSVTIRQILTTSADTKELKNAGKWREFCEKLGEALYLK | |
| | | SKDMSGGLKITRRILGDAEFHGKPDRLEKSRSVSIGSV | |
| | | LKETVVCGELVAKTPFFFGAIDEDAKQTDLQVLLTPDN | |
| | | KYRLPRSAVRGILRRDLQTYFDSPCNAELGGRPCMCKT | |
| | | CRIMRGITVMDARSEYNAPPEIRHRTRINPFTGTVAEG | |
| | | ALFNMEVAPEGIVFPFQLRYRGSEDGLPDALKTVLKWW | |
| | | AEGQAFMSGAASTGKGRFRMENAKYETLDLSDENQRND | |
| | | YLKNWGWRDEKGLEELKKRLNSGLPEPGNYRDPKWHEI | |
| | | NVSIEMASPFINGDPIRAAVDKRGTDVVTFVKYKAEGE | |
| | | EAKPVCAYKAESFRGVIRSAVARIHMEDGVPLTELTHS | |
| | | DCECLLCQIFGSEYEAGKIRFEDLVFESDPEPVTFDHV | |
| | | AIDRFTGGAADKKKFDDSPLPGSPARPLMLKGSFWIRR | |
| | | DVLEDEEYCKALGKALADVNNGLYPLGGKSAIGYGQVK | |
| | | SLGIKGDDKRISRLMNPAFDETDVAVPEKPKTDAEVRI | |
| | | EAEKVYYPHYFVEPHKKVEREEKPCGHQKFHEGRLTGK | |
| | | IRCKLITKTPLIVPDTSNDDFFRPADKEARKEKDEYHK | |
| | | SYAFFRLHKQIMIPGSELRGMVSSVYETVTNSCFRIFD | |
| | | ETKRLSWRMDADHQNVLQDFLPGRVTADGKHIQKFSET | |
| | | ARVPFYDKTQKHFDILDEQEIAGEKPVRMWVKRFIKRL | |
| | | SLVDPAKHPQKKQDNKWKRRKEGIATFIEQKNGSYYFN | |
| | | VVTNNGCTSFHLWHKPDNFDQEKLEGIQNGEKLDCWVR | |
| | | DSRYQKAFQEIPENDPDGWECKEGYLHVVGPSKVEFSD | |
| | | KKGDVINNFQGTLPSVPNDWKTIRTNDFKNRKRKNEPV | |
| | | FCCEDDKGNYYTMAKYCETFFFDLKENEEYEIPEKARI | |
| | | KYKELLRVYNNNPQAVPESVFQSRVARENVEKLKSGDL | |
| | | VYFKHNEKYVEDIVPVRISRTVDDRMIGKRMSADLRPC | |
| | | HGDWVEDGDLSALNAYPEKRLLLRHPKGLCPACRLFGT | |
| | | GSYKGRVRFGFASLENDPEWLIPGKNPGDPFHGGPVML | |
| | | SLLERPRPTWSIPGSDNKFKVPGRKFYVHHHAWKTIKD | |
| | | GNHPTTGKAIEQSPNNRTVEALAGGNSFSFEIAFENLK | |
| | | EWELGLLIHSLQLEKGLAHKLGMAKSMGFGSVEIDVES | |
| | | VRLRKDWKQWRNGNSEIPNWLGKGFAKLKEWFRDELDF | |
| | | IENLKKLLWFPEGDQAPRVCYPMLRKKDDPNGNSGYEE | |
| | | LKDGEFKKEDRQKKLTTPWTPWAMAEYLASIFGTEKDK | |
| | | VNCSFYFKIGACRHGDRCSRLHNKPTFSQTIALLNIYR | |
| | | NPQNSSQSADGLRCAVSDVEMQEHYDEFFEEVFTEMEE | |
| | | KYGEVEEMNVCDNLGDHLVGNVYVKFRREEDAEKAVID | |
| | | LNNRWFNGQPIHAELSPVTDFREACCRQYEMGECTRGG | |
| | | FCNFMHLKPISRELRRELYGRRRKKHRSRSRSRERRSR | |
| | | SRDRGRGGGGGGGGGGGGRERDRRRSRDRERSGRFKRT | |
| | | ADGSEFESPKKKRKV | |
| 505 | U2AF1 | MKRTADGSEFESPKKKRKVTTTMKISIEFLEPFRMTKW | 1892 |
| | XTENLinker_ | QESTRRNKNNKEFVRGQAFARWHRNKKDNTKGRPYITG | |
| | Ct | TLLRSAVIRSAENLLTLSDGKISEKTCCPGKFDTEDKD | |
| | | RLLQLRQRSTLRWTDKNPCPDNAETYCPFCELLGRSGN | |
| | | DGKKAEKKDWRFRIHFGNLSLPGKPDFDGPKAIGSQRV | |
| | | LNRVDFKSGKAHDFFKAYEVDHTRFPRFEGEITIDNKV | |
| | | SAEARKLLCDSLKFTDRLCGALCVIRFDEYTPAADSGK | |
| | | QTENVQAEPNANLAEKTAEQIISILDDNKKTEYTRLLA | |
| | | DAIRSLRRSSKLVAGLPKDHDGKDDHYLWDIGKKKKDE | |
| | | NSVTIRQILTTSADTKELKNAGKWREFCEKLGEALYLK | |
| | | SKDMSGGLKITRRILGDAEFHGKPDRLEKSRSVSIGSV | |
| | | LKETVVCGELVAKTPFFFGAIDEDAKQTDLQVLLTPDN | |
| | | KYRLPRSAVRGILRRDLQTYFDSPCNAELGGRPCMCKT | |
| | | CRIMRGITVMDARSEYNAPPEIRHRTRINPFTGTVAEG | |
| | | ALFNMEVAPEGIVFPFQLRYRGSEDGLPDALKTVLKWW | |
| | | AEGQAFMSGAASTGKGRFRMENAKYETLDLSDENQRND | |
| | | YLKNWGWRDEKGLEELKKRLNSGLPEPGNYRDPKWHEI | |
| | | NVSIEMASPFINGDPIRAAVDKRGTDVVTFVKYKAEGE | |
| | | EAKPVCAYKAESFRGVIRSAVARIHMEDGVPLTELTHS | |
| | | DCECLLCQIFGSEYEAGKIRFEDLVFESDPEPVTFDHV | |
| | | AIDRFTGGAADKKKFDDSPLPGSPARPLMLKGSFWIRR | |
| | | DVLEDEEYCKALGKALADVNNGLYPLGGKSAIGYGQVK | |
| | | SLGIKGDDKRISRLMNPAFDETDVAVPEKPKTDAEVRI | |
| | | EAEKVYYPHYFVEPHKKVEREEKPCGHQKFHEGRLTGK | |
| | | IRCKLITKTPLIVPDTSNDDFFRPADKEARKEKDEYHK | |
| | | SYAFFRLHKQIMIPGSELRGMVSSVYETVTNSCFRIFD | |
| | | ETKRLSWRMDADHQNVLQDFLPGRVTADGKHIQKFSET | |
| | | ARVPFYDKTQKHFDILDEQEIAGEKPVRMWVKRFIKRL | |
| | | SLVDPAKHPQKKQDNKWKRRKEGIATFIEQKNGSYYFN | |
| | | VVTNNGCTSFHLWHKPDNFDQEKLEGIQNGEKLDCWVR | |
| | | DSRYQKAFQEIPENDPDGWECKEGYLHVVGPSKVEFSD | |
| | | KKGDVINNFQGTLPSVPNDWKTIRTNDFKNRKRKNEPV | |
| | | FCCEDDKGNYYTMAKYCETFFFDLKENEEYEIPEKARI | |
| | | KYKELLRVYNNNPQAVPESVFQSRVARENVEKLKSGDL | |
| | | VYFKHNEKYVEDIVPVRISRTVDDRMIGKRMSADLRPC | |
| | | HGDWVEDGDLSALNAYPEKRLLLRHPKGLCPACRLFGT | |
| | | GSYKGRVRFGFASLENDPEWLIPGKNPGDPFHGGPVML | |
| | | SLLERPRPTWSIPGSDNKFKVPGRKFYVHHHAWKTIKD | |
| | | GNHPTTGKAIEQSPNNRTVEALAGGNSFSFEIAFENLK | |
| | | EWELGLLIHSLQLEKGLAHKLGMAKSMGFGSVEIDVES | |
| | | VRLRKDWKQWRNGNSEIPNWLGKGFAKLKEWFRDELDF | |
| | | IENLKKLLWFPEGDQAPRVCYPMLRKKDDPNGNSGYEE | |
| | | LKDGEFKKEDRQKKLTTPWTPWASGSETPGTSESATPE | |
| | | SAEYLASIFGTEKDKVNCSFYFKIGACRHGDRCSRLHN | |
| | | KPTFSQTIALLNIYRNPQNSSQSADGLRCAVSDVEMQE | |
| | | HYDEFFEEVFTEMEEKYGEVEEMNVCDNLGDHLVGNVY | |
| | | VKFRREEDAEKAVIDLNNRWFNGQPIHAELSPVTDFRE | |
| | | ACCRQYEMGECTRGGFCNFMHLKPISRELRRELYGRRR | |
| | | KKHRSRSRSRERRSRSRDRGRGGGGGGGGGGGGRERDR | |
| | | RRSRDRERSGRFKRTADGSEFESPKKKRKV | |
| 493 | U2AF2 | MKRTADGSEFESPKKKRKVTTTMKISIEFLEPFRMTKW | 2112 |
| | Direct_ | QESTRRNKNNKEFVRGQAFARWHRNKKDNTKGRPYITG | |
| | Ct | TLLRSAVIRSAENLLTLSDGKISEKTCCPGKFDTEDKD | |
| | | RLLQLRQRSTLRWTDKNPCPDNAETYCPFCELLGRSGN | |
| | | DGKKAEKKDWRFRIHFGNLSLPGKPDFDGPKAIGSQRV | |
| | | LNRVDFKSGKAHDFFKAYEVDHTRFPRFEGEITIDNKV | |
| | | SAEARKLLCDSLKFTDRLCGALCVIRFDEYTPAADSGK | |
| | | QTENVQAEPNANLAEKTAEQIISILDDNKKTEYTRLLA | |
| | | DAIRSLRRSSKLVAGLPKDHDGKDDHYLWDIGKKKKDE | |
| | | NSVTIRQILTTSADTKELKNAGKWREFCEKLGEALYLK | |
| | | SKDMSGGLKITRRILGDAEFHGKPDRLEKSRSVSIGSV | |
| | | LKETVVCGELVAKTPFFFGAIDEDAKQTDLQVLLTPDN | |
| | | KYRLPRSAVRGILRRDLQTYFDSPCNAELGGRPCMCKT | |
| | | CRIMRGITVMDARSEYNAPPEIRHRTRINPFTGTVAEG | |
| | | ALFNMEVAPEGIVFPFQLRYRGSEDGLPDALKTVLKWW | |
| | | AEGQAFMSGAASTGKGRFRMENAKYETLDLSDENQRND | |
| | | YLKNWGWRDEKGLEELKKRLNSGLPEPGNYRDPKWHEI | |
| | | NVSIEMASPFINGDPIRAAVDKRGTDVVTFVKYKAEGE | |
| | | EAKPVCAYKAESFRGVIRSAVARIHMEDGVPLTELTHS | |
| | | DCECLLCQIFGSEYEAGKIRFEDLVFESDPEPVTFDHV | |
| | | AIDRFTGGAADKKKFDDSPLPGSPARPLMLKGSFWIRR | |
| | | DVLEDEEYCKALGKALADVNNGLYPLGGKSAIGYGQVK | |
| | | SLGIKGDDKRISRLMNPAFDETDVAVPEKPKTDAEVRI | |
| | | EAEKVYYPHYFVEPHKKVEREEKPCGHQKFHEGRLTGK | |
| | | IRCKLITKTPLIVPDTSNDDFFRPADKEARKEKDEYHK | |
| | | SYAFFRLHKQIMIPGSELRGMVSSVYETVTNSCFRIFD | |
| | | ETKRLSWRMDADHQNVLQDFLPGRVTADGKHIQKFSET | |
| | | ARVPFYDKTQKHFDILDEQEIAGEKPVRMWVKRFIKRL | |
| | | SLVDPAKHPQKKQDNKWKRRKEGIATFIEQKNGSYYFN | |
| | | VVTNNGCTSFHLWHKPDNFDQEKLEGIQNGEKLDCWVR | |
| | | DSRYQKAFQEIPENDPDGWECKEGYLHVVGPSKVEFSD | |
| | | KKGDVINNFQGTLPSVPNDWKTIRTNDFKNRKRKNEPV | |
| | | FCCEDDKGNYYTMAKYCETFFFDLKENEEYEIPEKARI | |
| | | KYKELLRVYNNNPQAVPESVFQSRVARENVEKLKSGDL | |
| | | VYFKHNEKYVEDIVPVRISRTVDDRMIGKRMSADLRPC | |
| | | HGDWVEDGDLSALNAYPEKRLLLRHPKGLCPACRLFGT | |
| | | GSYKGRVRFGFASLENDPEWLIPGKNPGDPFHGGPVML | |
| | | SLLERPRPTWSIPGSDNKFKVPGRKFYVHHHAWKTIKD | |
| | | GNHPTTGKAIEQSPNNRTVEALAGGNSFSFEIAFENLK | |
| | | EWELGLLIHSLQLEKGLAHKLGMAKSMGFGSVEIDVES | |
| | | VRLRKDWKQWRNGNSEIPNWLGKGFAKLKEWFRDELDF | |
| | | IENLKKLLWFPEGDQAPRVCYPMLRKKDDPNGNSGYEE | |
| | | LKDGEFKKEDRQKKLTTPWTPWAMSDFDEFERQLNENK | |
| | | QERDKENRHRKRSHSRSRSRDRKRRSRSRDRRNRDQRS | |
| | | ASRDRRRRSKPLTRGAKEEHGGLIRSPRHEKKKKVRKY | |
| | | WDVPPPGFEHITPMQYKAMQAAGQIPATALLPTMTPDG | |
| | | LAVTPTPVPVVGSQMTRQARRLYVGNIPFGITEEAMMD | |
| | | FFNAQMRLGGLTQAPGNPVLAVQINQDKNFAFLEFRSV | |
| | | DETTQAMAFDGIIFQGQSLKIRRPHDYQPLPGMSENPS | |
| | | VYVPGVVSTVVPDSAHKLFIGGLPNYLNDDQVKELLTS | |
| | | FGPLKAFNLVKDSATGLSKGYAFCEYVDINVTDQAIAG | |
| | | LNGMQLGDKKLLVQRASVGAKNATLVSPPSTINQTPVT | |
| | | LQVPGLMSSQVQMGGHPTEVLCLMNMVLPEELLDDEEY | |
| | | EEIVEDVRDECSKYGLVKSIEIPRPVDGVEVPGCGKIF | |
| | | VEFTSVFDCQKAMQGLTGRKFANRVVVTKYCDPDSYHR | |
| | | RDFWKRTADGSEFESPKKKRKV | |
| 506 | U2AF2 | MKRTADGSEFESPKKKRKVTTTMKISIEFLEPFRMTKW | 2127 |
| | XTENLinker_ | QESTRRNKNNKEFVRGQAFARWHRNKKDNTKGRPYITG | |
| | Ct | TLLRSAVIRSAENLLTLSDGKISEKTCCPGKFDTEDKD | |
| | | RLLQLRQRSTLRWTDKNPCPDNAETYCPFCELLGRSGN | |
| | | DGKKAEKKDWRFRIHFGNLSLPGKPDFDGPKAIGSQRV | |
| | | LNRVDFKSGKAHDFFKAYEVDHTRFPRFEGEITIDNKV | |
| | | SAEARKLLCDSLKFTDRLCGALCVIRFDEYTPAADSGK | |
| | | QTENVQAEPNANLAEKTAEQIISILDDNKKTEYTRLLA | |
| | | DAIRSLRRSSKLVAGLPKDHDGKDDHYLWDIGKKKKDE | |
| | | NSVTIRQILTTSADTKELKNAGKWREFCEKLGEALYLK | |
| | | SKDMSGGLKITRRILGDAEFHGKPDRLEKSRSVSIGSV | |
| | | LKETVVCGELVAKTPFFFGAIDEDAKQTDLQVLLTPDN | |
| | | KYRLPRSAVRGILRRDLQTYFDSPCNAELGGRPCMCKT | |
| | | CRIMRGITVMDARSEYNAPPEIRHRTRINPFTGTVAEG | |
| | | ALFNMEVAPEGIVFPFQLRYRGSEDGLPDALKTVLKWW | |
| | | AEGQAFMSGAASTGKGRFRMENAKYETLDLSDENQRND | |
| | | YLKNWGWRDEKGLEELKKRLNSGLPEPGNYRDPKWHEI | |
| | | NVSIEMASPFINGDPIRAAVDKRGTDVVTFVKYKAEGE | |
| | | EAKPVCAYKAESFRGVIRSAVARIHMEDGVPLTELTHS | |
| | | DCECLLCQIFGSEYEAGKIRFEDLVFESDPEPVTFDHV | |
| | | AIDRFTGGAADKKKFDDSPLPGSPARPLMLKGSFWIRR | |
| | | DVLEDEEYCKALGKALADVNNGLYPLGGKSAIGYGQVK | |
| | | SLGIKGDDKRISRLMNPAFDETDVAVPEKPKTDAEVRI | |
| | | EAEKVYYPHYFVEPHKKVEREEKPCGHQKFHEGRLTGK | |
| | | IRCKLITKTPLIVPDTSNDDFFRPADKEARKEKDEYHK | |
| | | SYAFFRLHKQIMIPGSELRGMVSSVYETVTNSCFRIFD | |
| | | ETKRLSWRMDADHQNVLQDFLPGRVTADGKHIQKFSET | |
| | | ARVPFYDKTQKHFDILDEQEIAGEKPVRMWVKRFIKRL | |
| | | SLVDPAKHPQKKQDNKWKRRKEGIATFIEQKNGSYYFN | |
| | | VVTNNGCTSFHLWHKPDNFDQEKLEGIQNGEKLDCWVR | |
| | | DSRYQKAFQEIPENDPDGWECKEGYLHVVGPSKVEFSD | |
| | | KKGDVINNFQGTLPSVPNDWKTIRTNDFKNRKRKNEPV | |
| | | FCCEDDKGNYYTMAKYCETFFFDLKENEEYEIPEKARI | |
| | | KYKELLRVYNNNPQAVPESVFQSRVARENVEKLKSGDL | |
| | | VYFKHNEKYVEDIVPVRISRTVDDRMIGKRMSADLRPC | |
| | | HGDWVEDGDLSALNAYPEKRLLLRHPKGLCPACRLFGT | |
| | | GSYKGRVRFGFASLENDPEWLIPGKNPGDPFHGGPVML | |
| | | SLLERPRPTWSIPGSDNKFKVPGRKFYVHHHAWKTIKD | |
| | | GNHPTTGKAIEQSPNNRTVEALAGGNSFSFEIAFENLK | |
| | | EWELGLLIHSLQLEKGLAHKLGMAKSMGFGSVEIDVES | |
| | | VRLRKDWKQWRNGNSEIPNWLGKGFAKLKEWFRDELDF | |
| | | IENLKKLLWFPEGDQAPRVCYPMLRKKDDPNGNSGYEE | |
| | | LKDGEFKKEDRQKKLTTPWTPWASGSETPGTSESATPE | |
| | | SSDFDEFERQLNENKQERDKENRHRKRSHSRSRSRDRK | |
| | | RRSRSRDRRNRDQRSASRDRRRRSKPLTRGAKEEHGGL | |
| | | IRSPRHEKKKKVRKYWDVPPPGFEHITPMQYKAMQAAG | |
| | | QIPATALLPTMTPDGLAVTPTPVPVVGSQMTRQARRLY | |
| | | VGNIPFGITEEAMMDFFNAQMRLGGLTQAPGNPVLAVQ | |
| | | INQDKNFAFLEFRSVDETTQAMAFDGIIFQGQSLKIRR | |
| | | PHDYQPLPGMSENPSVYVPGVVSTVVPDSAHKLFIGGL | |
| | | PNYLNDDQVKELLTSFGPLKAFNLVKDSATGLSKGYAF | |
| | | CEYVDINVTDQAIAGLNGMQLGDKKLLVQRASVGAKNA | |
| | | TLVSPPSTINQTPVTLQVPGLMSSQVQMGGHPTEVLCL | |
| | | MNMVLPEELLDDEEYEEIVEDVRDECSKYGLVKSIEIP | |
| | | RPVDGVEVPGCGKIFVEFTSVFDCQKAMQGLTGRKFAN | |
| | | RVVVTKYCDPDSYHRRDFWKRTADGSEFESPKKKRKV | |
| 179 | RBM17 | MSLYDDLGVETSDSKTEGWSKNFKLLQSQLQVKKAALT | 401 |
| | splicing | QAKSQRTKQSTVLAPVIDLKRGGSSDDRQIVDTPPHVA | |
| | factor | AGLKDPVPSGFSAGEVLIPLADEYDPMFPNDYEKVVKR | |
| | expression | QREERQRQRELERQKEIEEREKRRKDRHEASGFARRPD | |
| | | PDSDEDEDYERERRKRSMGGAAIAPPTSLVEKDKELPR | |
| | | DFPYEEDSRPRSQSSKAAIPPPVYEEQDRPRSPTGPSN | |
| | | SFLANMGGTVAHKIMQKYGFREGQGLGKHEQGLSTALS | |
| | | VEKTSKRGGKIIVGDATEKDASKKSDSNPLTEILKCPT | |
| | | KVVLLRNMVGAGEVDEDLEVETKEECEKYGKVGKCVIF | |
| | | EIPGAPDDEAVRIFLEFERVESAIKAVVDLNGRYFGGR | |
| | | VVKACFYNLDKFRVLDLAEQV | |
| 507 | RBM17_G | MKRTADGSEFESPKKKRKVTTTMKISIEFLEPFRMTKW | 2052 |
| | GSLinker_ | QESTRRNKNNKEFVRGQAFARWHRNKKDNTKGRPYITG | |
| | Ct | TLLRSAVIRSAENLLTLSDGKISEKTCCPGKFDTEDKD | |
| | | RLLQLRQRSTLRWTDKNPCPDNAETYCPFCELLGRSGN | |
| | | DGKKAEKKDWRFRIHFGNLSLPGKPDFDGPKAIGSQRV | |
| | | LNRVDFKSGKAHDFFKAYEVDHTRFPRFEGEITIDNKV | |
| | | SAEARKLLCDSLKFTDRLCGALCVIRFDEYTPAADSGK | |
| | | QTENVQAEPNANLAEKTAEQIISILDDNKKTEYTRLLA | |
| | | DAIRSLRRSSKLVAGLPKDHDGKDDHYLWDIGKKKKDE | |
| | | NSVTIRQILTTSADTKELKNAGKWREFCEKLGEALYLK | |
| | | SKDMSGGLKITRRILGDAEFHGKPDRLEKSRSVSIGSV | |
| | | LKETVVCGELVAKTPFFFGAIDEDAKQTDLQVLLTPDN | |
| | | KYRLPRSAVRGILRRDLQTYFDSPCNAELGGRPCMCKT | |
| | | CRIMRGITVMDARSEYNAPPEIRHRTRINPFTGTVAEG | |
| | | ALFNMEVAPEGIVFPFQLRYRGSEDGLPDALKTVLKWW | |
| | | AEGQAFMSGAASTGKGRFRMENAKYETLDLSDENQRND | |
| | | YLKNWGWRDEKGLEELKKRLNSGLPEPGNYRDPKWHEI | |
| | | NVSIEMASPFINGDPIRAAVDKRGTDVVTFVKYKAEGE | |
| | | EAKPVCAYKAESFRGVIRSAVARIHMEDGVPLTELTHS | |
| | | DCECLLCQIFGSEYEAGKIRFEDLVFESDPEPVTFDHV | |
| | | AIDRFTGGAADKKKFDDSPLPGSPARPLMLKGSFWIRR | |
| | | DVLEDEEYCKALGKALADVNNGLYPLGGKSAIGYGQVK | |
| | | SLGIKGDDKRISRLMNPAFDETDVAVPEKPKTDAEVRI | |
| | | EAEKVYYPHYFVEPHKKVEREEKPCGHQKFHEGRLTGK | |
| | | IRCKLITKTPLIVPDTSNDDFFRPADKEARKEKDEYHK | |
| | | SYAFFRLHKQIMIPGSELRGMVSSVYETVTNSCFRIFD | |
| | | ETKRLSWRMDADHQNVLQDFLPGRVTADGKHIQKFSET | |
| | | ARVPFYDKTQKHFDILDEQEIAGEKPVRMWVKRFIKRL | |
| | | SLVDPAKHPQKKQDNKWKRRKEGIATFIEQKNGSYYFN | |
| | | VVTNNGCTSFHLWHKPDNFDQEKLEGIQNGEKLDCWVR | |
| | | DSRYQKAFQEIPENDPDGWECKEGYLHVVGPSKVEFSD | |
| | | KKGDVINNFQGTLPSVPNDWKTIRTNDFKNRKRKNEPV | |
| | | FCCEDDKGNYYTMAKYCETFFFDLKENEEYEIPEKARI | |
| | | KYKELLRVYNNNPQAVPESVFQSRVARENVEKLKSGDL | |
| | | VYFKHNEKYVEDIVPVRISRTVDDRMIGKRMSADLRPC | |
| | | HGDWVEDGDLSALNAYPEKRLLLRHPKGLCPACRLFGT | |
| | | GSYKGRVRFGFASLENDPEWLIPGKNPGDPFHGGPVML | |
| | | SLLERPRPTWSIPGSDNKFKVPGRKFYVHHHAWKTIKD | |
| | | GNHPTTGKAIEQSPNNRTVEALAGGNSFSFEIAFENLK | |
| | | EWELGLLIHSLQLEKGLAHKLGMAKSMGFGSVEIDVES | |
| | | VRLRKDWKQWRNGNSEIPNWLGKGFAKLKEWFRDELDF | |
| | | IENLKKLLWFPEGDQAPRVCYPMLRKKDDPNGNSGYEE | |
| | | LKDGEFKKEDRQKKLTTPWTPWAGSGGSGSGGSGSGGS | |
| | | SLYDDLGVETSDSKTEGWSKNFKLLQSQLQVKKAALTQ | |
| | | AKSQRTKQSTVLAPVIDLKRGGSSDDRQIVDTPPHVAA | |
| | | GLKDPVPSGFSAGEVLIPLADEYDPMFPNDYEKVVKRQ | |
| | | REERQRQRELERQKEIEEREKRRKDRHEASGFARRPDP | |
| | | DSDEDEDYERERRKRSMGGAAIAPPTSLVEKDKELPRD | |
| | | FPYEEDSRPRSQSSKAAIPPPVYEEQDRPRSPTGPSNS | |
| | | FLANMGGTVAHKIMQKYGFREGQGLGKHEQGLSTALSV | |
| | | EKTSKRGGKIIVGDATEKDASKKSDSNPLTEILKCPTK | |
| | | VVLLRNMVGAGEVDEDLEVETKEECEKYGKVGKCVIFE | |
| | | IPGAPDDEAVRIFLEFERVESAIKAVVDLNGRYFGGRV | |
| | | VKACFYNLDKFRVLDLAEQVKRTADGSEFESPKKKRKV | |
| 180 | SF3B6 | MAMQAAKRANIRLPPEVNRILYIRNLPYKITAEEMYDI | 125 |
| | splicing | FGKYGPIRQIRVGNTPETRGTAYVVYEDIFDAKNACDH | |
| | factor | LSGFNVCNRYLVVLYYNANRAFQKMDTKKKEEQLKLLK | |
| | expression | EKYGINTDPPK | |
| 508 | SF3B6_G | MKRTADGSEFESPKKKRKVTTTMKISIEFLEPFRMTKW | 1776 |
| | GSLinker_ | QESTRRNKNNKEFVRGQAFARWHRNKKDNTKGRPYITG | |
| | Ct | TLLRSAVIRSAENLLTLSDGKISEKTCCPGKFDTEDKD | |
| | | RLLQLRQRSTLRWTDKNPCPDNAETYCPFCELLGRSGN | |
| | | DGKKAEKKDWRFRIHFGNLSLPGKPDFDGPKAIGSQRV | |
| | | LNRVDFKSGKAHDFFKAYEVDHTRFPRFEGEITIDNKV | |
| | | SAEARKLLCDSLKFTDRLCGALCVIRFDEYTPAADSGK | |
| | | QTENVQAEPNANLAEKTAEQIISILDDNKKTEYTRLLA | |
| | | DAIRSLRRSSKLVAGLPKDHDGKDDHYLWDIGKKKKDE | |
| | | NSVTIRQILTTSADTKELKNAGKWREFCEKLGEALYLK | |
| | | SKDMSGGLKITRRILGDAEFHGKPDRLEKSRSVSIGSV | |
| | | LKETVVCGELVAKTPFFFGAIDEDAKQTDLQVLLTPDN | |
| | | KYRLPRSAVRGILRRDLQTYFDSPCNAELGGRPCMCKT | |
| | | CRIMRGITVMDARSEYNAPPEIRHRTRINPFTGTVAEG | |
| | | ALFNMEVAPEGIVFPFQLRYRGSEDGLPDALKTVLKWW | |
| | | AEGQAFMSGAASTGKGRFRMENAKYETLDLSDENQRND | |
| | | YLKNWGWRDEKGLEELKKRLNSGLPEPGNYRDPKWHEI | |
| | | NVSIEMASPFINGDPIRAAVDKRGTDVVTFVKYKAEGE | |
| | | EAKPVCAYKAESFRGVIRSAVARIHMEDGVPLTELTHS | |
| | | DCECLLCQIFGSEYEAGKIRFEDLVFESDPEPVTFDHV | |
| | | AIDRFTGGAADKKKFDDSPLPGSPARPLMLKGSFWIRR | |
| | | DVLEDEEYCKALGKALADVNNGLYPLGGKSAIGYGQVK | |
| | | SLGIKGDDKRISRLMNPAFDETDVAVPEKPKTDAEVRI | |
| | | EAEKVYYPHYFVEPHKKVEREEKPCGHQKFHEGRLTGK | |
| | | IRCKLITKTPLIVPDTSNDDFFRPADKEARKEKDEYHK | |
| | | SYAFFRLHKQIMIPGSELRGMVSSVYETVTNSCFRIFD | |
| | | ETKRLSWRMDADHQNVLQDFLPGRVTADGKHIQKFSET | |
| | | ARVPFYDKTQKHFDILDEQEIAGEKPVRMWVKRFIKRL | |
| | | SLVDPAKHPQKKQDNKWKRRKEGIATFIEQKNGSYYFN | |
| | | VVTNNGCTSFHLWHKPDNFDQEKLEGIQNGEKLDCWVR | |
| | | DSRYQKAFQEIPENDPDGWECKEGYLHVVGPSKVEFSD | |
| | | KKGDVINNFQGTLPSVPNDWKTIRTNDFKNRKRKNEPV | |
| | | FCCEDDKGNYYTMAKYCETFFFDLKENEEYEIPEKARI | |
| | | KYKELLRVYNNNPQAVPESVFQSRVARENVEKLKSGDL | |
| | | VYFKHNEKYVEDIVPVRISRTVDDRMIGKRMSADLRPC | |
| | | HGDWVEDGDLSALNAYPEKRLLLRHPKGLCPACRLFGT | |
| | | GSYKGRVRFGFASLENDPEWLIPGKNPGDPFHGGPVML | |
| | | SLLERPRPTWSIPGSDNKFKVPGRKFYVHHHAWKTIKD | |
| | | GNHPTTGKAIEQSPNNRTVEALAGGNSESFEIAFENLK | |
| | | EWELGLLIHSLQLEKGLAHKLGMAKSMGFGSVEIDVES | |
| | | VRLRKDWKQWRNGNSEIPNWLGKGFAKLKEWFRDELDF | |
| | | IENLKKLLWFPEGDQAPRVCYPMLRKKDDPNGNSGYEE | |
| | | LKDGEFKKEDRQKKLTTPWTPWAGSGGSGSGGSGSGGS | |
| | | AMQAAKRANIRLPPEVNRILYIRNLPYKITAEEMYDIF | |
| | | GKYGPIRQIRVGNTPETRGTAYVVYEDIFDAKNACDHL | |
| | | SGFNVCNRYLVVLYYNANRAFQKMDTKKKEEQLKLLKE | |
| | | KYGINTDPPKKRTADGSEFESPKKKRKV | |
| 181 | U2AF1 | MAEYLASIFGTEKDKVNCSFYFKIGACRHGDRCSRLHN | 240 |
| | splicing | KPTFSQTIALLNIYRNPQNSSQSADGLRCAVSDVEMQE | |
| | factor | HYDEFFEEVFTEMEEKYGEVEEMNVCDNLGDHLVGNVY | |
| | expression | VKFRREEDAEKAVIDLNNRWFNGQPIHAELSPVTDFRE | |
| | | ACCRQYEMGECTRGGFCNFMHLKPISRELRRELYGRRR | |
| | | KKHRSRSRSRERRSRSRDRGRGGGGGGGGGGGGRERDR | |
| | | RRSRDRERSGRF | |
| 509 | U2AF1_ | MKRTADGSEFESPKKKRKVTTTMKISIEFLEPFRMTKW | 1891 |
| | GSLinker_ | QESTRRNKNNKEFVRGQAFARWHRNKKDNTKGRPYITG | |
| | Ct | TLLRSAVIRSAENLLTLSDGKISEKTCCPGKFDTEDKD | |
| | | RLLQLRQRSTLRWTDKNPCPDNAETYCPFCELLGRSGN | |
| | | DGKKAEKKDWRFRIHFGNLSLPGKPDFDGPKAIGSQRV | |
| | | LNRVDFKSGKAHDFFKAYEVDHTRFPRFEGEITIDNKV | |
| | | SAEARKLLCDSLKFTDRLCGALCVIRFDEYTPAADSGK | |
| | | QTENVQAEPNANLAEKTAEQIISILDDNKKTEYTRLLA | |
| | | DAIRSLRRSSKLVAGLPKDHDGKDDHYLWDIGKKKKDE | |
| | | NSVTIRQILTTSADTKELKNAGKWREFCEKLGEALYLK | |
| | | SKDMSGGLKITRRILGDAEFHGKPDRLEKSRSVSIGSV | |
| | | LKETVVCGELVAKTPFFFGAIDEDAKQTDLQVLLTPDN | |
| | | KYRLPRSAVRGILRRDLQTYFDSPCNAELGGRPCMCKT | |
| | | CRIMRGITVMDARSEYNAPPEIRHRTRINPFTGTVAEG | |
| | | ALFNMEVAPEGIVFPFQLRYRGSEDGLPDALKTVLKWW | |
| | | AEGQAFMSGAASTGKGRFRMENAKYETLDLSDENQRND | |
| | | YLKNWGWRDEKGLEELKKRLNSGLPEPGNYRDPKWHEI | |
| | | NVSIEMASPFINGDPIRAAVDKRGTDVVTFVKYKAEGE | |
| | | EAKPVCAYKAESFRGVIRSAVARIHMEDGVPLTELTHS | |
| | | DCECLLCQIFGSEYEAGKIRFEDLVFESDPEPVTFDHV | |
| | | AIDRFTGGAADKKKFDDSPLPGSPARPLMLKGSFWIRR | |
| | | DVLEDEEYCKALGKALADVNNGLYPLGGKSAIGYGQVK | |
| | | SLGIKGDDKRISRLMNPAFDETDVAVPEKPKTDAEVRI | |
| | | EAEKVYYPHYFVEPHKKVEREEKPCGHQKFHEGRLTGK | |
| | | IRCKLITKTPLIVPDTSNDDFFRPADKEARKEKDEYHK | |
| | | SYAFFRLHKQIMIPGSELRGMVSSVYETVTNSCFRIFD | |
| | | ETKRLSWRMDADHQNVLQDFLPGRVTADGKHIQKFSET | |
| | | ARVPFYDKTQKHFDILDEQEIAGEKPVRMWVKRFIKRL | |
| | | SLVDPAKHPQKKQDNKWKRRKEGIATFIEQKNGSYYFN | |
| | | VVTNNGCTSFHLWHKPDNFDQEKLEGIQNGEKLDCWVR | |
| | | DSRYQKAFQEIPENDPDGWECKEGYLHVVGPSKVEFSD | |
| | | KKGDVINNFQGTLPSVPNDWKTIRTNDFKNRKRKNEPV | |
| | | FCCEDDKGNYYTMAKYCETFFFDLKENEEYEIPEKARI | |
| | | KYKELLRVYNNNPQAVPESVFQSRVARENVEKLKSGDL | |
| | | VYFKHNEKYVEDIVPVRISRTVDDRMIGKRMSADLRPC | |
| | | HGDWVEDGDLSALNAYPEKRLLLRHPKGLCPACRLFGT | |
| | | GSYKGRVRFGFASLENDPEWLIPGKNPGDPFHGGPVML | |
| | | SLLERPRPTWSIPGSDNKFKVPGRKFYVHHHAWKTIKD | |
| | | GNHPTTGKAIEQSPNNRTVEALAGGNSFSFEIAFENLK | |
| | | EWELGLLIHSLQLEKGLAHKLGMAKSMGFGSVEIDVES | |
| | | VRLRKDWKQWRNGNSEIPNWLGKGFAKLKEWFRDELDF | |
| | | IENLKKLLWFPEGDQAPRVCYPMLRKKDDPNGNSGYEE | |
| | | LKDGEFKKEDRQKKLTTPWTPWAGSGGSGSGGSGSGGS | |
| | | AEYLASIFGTEKDKVNCSFYFKIGACRHGDRCSRLHNK | |
| | | PTFSQTIALLNIYRNPQNSSQSADGLRCAVSDVEMQEH | |
| | | YDEFFEEVFTEMEEKYGEVEEMNVCDNLGDHLVGNVYV | |
| | | KFRREEDAEKAVIDLNNRWFNGQPIHAELSPVTDFREA | |
| | | CCRQYEMGECTRGGFCNFMHLKPISRELRRELYGRRRK | |
| | | KHRSRSRSRERRSRSRDRGRGGGGGGGGGGGGRERDRR | |
| | | RSRDRERSGRFKRTADGSEFESPKKKRKV | |
| 182 | U2AF2 | MSDFDEFERQLNENKQERDKENRHRKRSHSRSRSRDRK | 475 |
| | splicing | RRSRSRDRRNRDQRSASRDRRRRSKPLTRGAKEEHGGL | |
| | factor | IRSPRHEKKKKVRKYWDVPPPGFEHITPMQYKAMQAAG | |
| | expression | QIPATALLPTMTPDGLAVTPTPVPVVGSQMTRQARRLY | |
| | | VGNIPFGITEEAMMDFFNAQMRLGGLTQAPGNPVLAVQ | |
| | | INQDKNFAFLEFRSVDETTQAMAFDGIIFQGQSLKIRR | |
| | | PHDYQPLPGMSENPSVYVPGVVSTVVPDSAHKLFIGGL | |
| | | PNYLNDDQVKELLTSFGPLKAFNLVKDSATGLSKGYAF | |
| | | CEYVDINVTDQAIAGLNGMQLGDKKLLVQRASVGAKNA | |
| | | TLVSPPSTINQTPVTLQVPGLMSSQVQMGGHPTEVLCL | |
| | | MNMVLPEELLDDEEYEEIVEDVRDECSKYGLVKSIEIP | |
| | | RPVDGVEVPGCGKIFVEFTSVEDCQKAMQGLTGRKFAN | |
| | | RVVVTKYCDPDSYHRRDFW | |
| 510 | U2AF2_ | MKRTADGSEFESPKKKRKVTTTMKISIEFLEPFRMTKW | 2126 |
| | GSLinker_ | QESTRRNKNNKEFVRGQAFARWHRNKKDNTKGRPYITG | |
| | Ct | TLLRSAVIRSAENLLTLSDGKISEKTCCPGKFDTEDKD | |
| | | RLLQLRQRSTLRWTDKNPCPDNAETYCPFCELLGRSGN | |
| | | DGKKAEKKDWRFRIHFGNLSLPGKPDFDGPKAIGSQRV | |
| | | LNRVDFKSGKAHDFFKAYEVDHTRFPRFEGEITIDNKV | |
| | | SAEARKLLCDSLKFTDRLCGALCVIRFDEYTPAADSGK | |
| | | QTENVQAEPNANLAEKTAEQIISILDDNKKTEYTRLLA | |
| | | DAIRSLRRSSKLVAGLPKDHDGKDDHYLWDIGKKKKDE | |
| | | NSVTIRQILTTSADTKELKNAGKWREFCEKLGEALYLK | |
| | | SKDMSGGLKITRRILGDAEFHGKPDRLEKSRSVSIGSV | |
| | | LKETVVCGELVAKTPFFFGAIDEDAKQTDLQVLLTPDN | |
| | | KYRLPRSAVRGILRRDLQTYFDSPCNAELGGRPCMCKT | |
| | | CRIMRGITVMDARSEYNAPPEIRHRTRINPFTGTVAEG | |
| | | ALFNMEVAPEGIVFPFQLRYRGSEDGLPDALKTVLKWW | |
| | | AEGQAFMSGAASTGKGRFRMENAKYETLDLSDENQRND | |
| | | YLKNWGWRDEKGLEELKKRLNSGLPEPGNYRDPKWHEI | |
| | | NVSIEMASPFINGDPIRAAVDKRGTDVVTFVKYKAEGE | |
| | | EAKPVCAYKAESFRGVIRSAVARIHMEDGVPLTELTHS | |
| | | DCECLLCQIFGSEYEAGKIRFEDLVFESDPEPVTFDHV | |
| | | AIDRFTGGAADKKKFDDSPLPGSPARPLMLKGSFWIRR | |
| | | DVLEDEEYCKALGKALADVNNGLYPLGGKSAIGYGQVK | |
| | | SLGIKGDDKRISRLMNPAFDETDVAVPEKPKTDAEVRI | |
| | | EAEKVYYPHYFVEPHKKVEREEKPCGHQKFHEGRLTGK | |
| | | IRCKLITKTPLIVPDTSNDDFFRPADKEARKEKDEYHK | |
| | | SYAFFRLHKQIMIPGSELRGMVSSVYETVTNSCFRIFD | |
| | | ETKRLSWRMDADHQNVLQDFLPGRVTADGKHIQKFSET | |
| | | ARVPFYDKTQKHFDILDEQEIAGEKPVRMWVKRFIKRL | |
| | | SLVDPAKHPQKKQDNKWKRRKEGIATFIEQKNGSYYFN | |
| | | VVTNNGCTSFHLWHKPDNFDQEKLEGIQNGEKLDCWVR | |
| | | DSRYQKAFQEIPENDPDGWECKEGYLHVVGPSKVEFSD | |
| | | KKGDVINNFQGTLPSVPNDWKTIRTNDFKNRKRKNEPV | |
| | | FCCEDDKGNYYTMAKYCETFFFDLKENEEYEIPEKARI | |
| | | KYKELLRVYNNNPQAVPESVFQSRVARENVEKLKSGDL | |
| | | VYFKHNEKYVEDIVPVRISRTVDDRMIGKRMSADLRPC | |
| | | HGDWVEDGDLSALNAYPEKRLLLRHPKGLCPACRLFGT | |
| | | GSYKGRVRFGFASLENDPEWLIPGKNPGDPFHGGPVML | |
| | | SLLERPRPTWSIPGSDNKFKVPGRKFYVHHHAWKTIKD | |
| | | GNHPTTGKAIEQSPNNRTVEALAGGNSFSFEIAFENLK | |
| | | EWELGLLIHSLQLEKGLAHKLGMAKSMGFGSVEIDVES | |
| | | VRLRKDWKQWRNGNSEIPNWLGKGFAKLKEWFRDELDF | |
| | | IENLKKLLWFPEGDQAPRVCYPMLRKKDDPNGNSGYEE | |
| | | LKDGEFKKEDRQKKLTTPWTPWAGSGGSGSGGSGSGGS | |
| | | SDFDEFERQLNENKQERDKENRHRKRSHSRSRSRDRKR | |
| | | RSRSRDRRNRDQRSASRDRRRRSKPLTRGAKEEHGGLI | |
| | | RSPRHEKKKKVRKYWDVPPPGFEHITPMQYKAMQAAGQ | |
| | | IPATALLPTMTPDGLAVTPTPVPVVGSQMTRQARRLYV | |
| | | GNIPFGITEEAMMDFFNAQMRLGGLTQAPGNPVLAVQI | |
| | | NQDKNFAFLEFRSVDETTQAMAFDGIIFQGQSLKIRRP | |
| | | HDYQPLPGMSENPSVYVPGVVSTVVPDSAHKLFIGGLP | |
| | | NYLNDDQVKELLTSFGPLKAFNLVKDSATGLSKGYAFC | |
| | | EYVDINVTDQAIAGLNGMQLGDKKLLVQRASVGAKNAT | |
| | | LVSPPSTINQTPVTLQVPGLMSSQVQMGGHPTEVLCLM | |
| | | NMVLPEELLDDEEYEEIVEDVRDECSKYGLVKSIEIPR | |
| | | PVDGVEVPGCGKIFVEFTSVEDCQKAMQGLTGRKFANR | |
| | | VVVTKYCDPDSYHRRDFWKRTADGSEFESPKKKRKV | |
| 511 | Ct- | MKRTADGSEFESPKKKRKVTTTMKISIEFLEPFRMTKW | 2002 |
| | SF3B6- | QESTRRNKNNKEFVRGQAFARWHRNKKDNTKGRPYITG | |
| | U2AF1 | TLLRSAVIRSAENLLTLSDGKISEKTCCPGKFDTEDKD | |
| | | RLLQLRQRSTLRWTDKNPCPDNAETYCPFCELLGRSGN | |
| | | DGKKAEKKDWRFRIHFGNLSLPGKPDFDGPKAIGSQRV | |
| | | LNRVDFKSGKAHDFFKAYEVDHTRFPRFEGEITIDNKV | |
| | | SAEARKLLCDSLKFTDRLCGALCVIRFDEYTPAADSGK | |
| | | QTENVQAEPNANLAEKTAEQIISILDDNKKTEYTRLLA | |
| | | DAIRSLRRSSKLVAGLPKDHDGKDDHYLWDIGKKKKDE | |
| | | NSVTIRQILTTSADTKELKNAGKWREFCEKLGEALYLK | |
| | | SKDMSGGLKITRRILGDAEFHGKPDRLEKSRSVSIGSV | |
| | | LKETVVCGELVAKTPFFFGAIDEDAKQTDLQVLLTPDN | |
| | | KYRLPRSAVRGILRRDLQTYFDSPCNAELGGRPCMCKT | |
| | | CRIMRGITVMDARSEYNAPPEIRHRTRINPFTGTVAEG | |
| | | ALFNMEVAPEGIVFPFQLRYRGSEDGLPDALKTVLKWW | |
| | | AEGQAFMSGAASTGKGRFRMENAKYETLDLSDENQRND | |
| | | YLKNWGWRDEKGLEELKKRLNSGLPEPGNYRDPKWHEI | |
| | | NVSIEMASPFINGDPIRAAVDKRGTDVVTFVKYKAEGE | |
| | | EAKPVCAYKAESFRGVIRSAVARIHMEDGVPLTELTHS | |
| | | DCECLLCQIFGSEYEAGKIRFEDLVFESDPEPVTFDHV | |
| | | AIDRFTGGAADKKKEDDSPLPGSPARPLMLKGSFWIRR | |
| | | DVLEDEEYCKALGKALADVNNGLYPLGGKSAIGYGQVK | |
| | | SLGIKGDDKRISRLMNPAFDETDVAVPEKPKTDAEVRI | |
| | | EAEKVYYPHYFVEPHKKVEREEKPCGHQKFHEGRLTGK | |
| | | IRCKLITKTPLIVPDTSNDDFFRPADKEARKEKDEYHK | |
| | | SYAFFRLHKQIMIPGSELRGMVSSVYETVTNSCFRIFD | |
| | | ETKRLSWRMDADHQNVLQDFLPGRVTADGKHIQKFSET | |
| | | ARVPFYDKTQKHFDILDEQEIAGEKPVRMWVKRFIKRL | |
| | | SLVDPAKHPQKKQDNKWKRRKEGIATFIEQKNGSYYFN | |
| | | VVTNNGCTSFHLWHKPDNFDQEKLEGIQNGEKLDCWVR | |
| | | DSRYQKAFQEIPENDPDGWECKEGYLHVVGPSKVEFSD | |
| | | KKGDVINNFQGTLPSVPNDWKTIRTNDFKNRKRKNEPV | |
| | | FCCEDDKGNYYTMAKYCETFFFDLKENEEYEIPEKARI | |
| | | KYKELLRVYNNNPQAVPESVFQSRVARENVEKLKSGDL | |
| | | VYFKHNEKYVEDIVPVRISRTVDDRMIGKRMSADLRPC | |
| | | HGDWVEDGDLSALNAYPEKRLLLRHPKGLCPACRLFGT | |
| | | GSYKGRVRFGFASLENDPEWLIPGKNPGDPFHGGPVML | |
| | | SLLERPRPTWSIPGSDNKFKVPGRKFYVHHHAWKTIKD | |
| | | GNHPTTGKAIEQSPNNRTVEALAGGNSFSFEIAFENLK | |
| | | EWELGLLIHSLQLEKGLAHKLGMAKSMGFGSVEIDVES | |
| | | VRLRKDWKQWRNGNSEIPNWLGKGFAKLKEWFRDELDF | |
| | | IENLKKLLWFPEGDQAPRVCYPMLRKKDDPNGNSGYEE | |
| | | LKDGEFKKEDRQKKLTTPWTPWAMAMQAAKRANIRLPP | |
| | | EVNRILYIRNLPYKITAEEMYDIFGKYGPIRQIRVGNT | |
| | | PETRGTAYVVYEDIFDAKNACDHLSGFNVCNRYLVVLY | |
| | | YNANRAFQKMDTKKKEEQLKLLKEKYGINTDPPKMAEY | |
| | | LASIFGTEKDKVNCSFYFKIGACRHGDRCSRLHNKPTF | |
| | | SQTIALLNIYRNPQNSSQSADGLRCAVSDVEMQEHYDE | |
| | | FFEEVFTEMEEKYGEVEEMNVCDNLGDHLVGNVYVKFR | |
| | | REEDAEKAVIDLNNRWFNGQPLHAELSPVTDFREACCR | |
| | | QYEMGECTRGGFCNEMHLKPISRELRRELYGRRRKKHR | |
| | | SRSRSRERRSRSRDRGRGGGGGGGGGGGGRERDRRRSR | |
| | | DRERSGRFKRTADGSEFESPKKKRKV | |
| 512 | Ct- | MKRTADGSEFESPKKKRKVTTTMKISIEFLEPFRMTKW | 2278 |
| | U2AF1- | QESTRRNKNNKEFVRGQAFARWHRNKKDNTKGRPYITG | |
| | RBM17 | TLLRSAVIRSAENLLTLSDGKISEKTCCPGKFDTEDKD | |
| | | RLLQLRQRSTLRWTDKNPCPDNAETYCPFCELLGRSGN | |
| | | DGKKAEKKDWRFRIHFGNLSLPGKPDFDGPKAIGSQRV | |
| | | LNRVDFKSGKAHDFFKAYEVDHTRFPRFEGEITIDNKV | |
| | | SAEARKLLCDSLKFTDRLCGALCVIRFDEYTPAADSGK | |
| | | QTENVQAEPNANLAEKTAEQIISILDDNKKTEYTRLLA | |
| | | DAIRSLRRSSKLVAGLPKDHDGKDDHYLWDIGKKKKDE | |
| | | NSVTIRQILTTSADTKELKNAGKWREFCEKLGEALYLK | |
| | | SKDMSGGLKITRRILGDAEFHGKPDRLEKSRSVSIGSV | |
| | | LKETVVCGELVAKTPFFFGAIDEDAKQTDLQVLLTPDN | |
| | | KYRLPRSAVRGILRRDLQTYFDSPCNAELGGRPCMCKT | |
| | | CRIMRGITVMDARSEYNAPPEIRHRTRINPFTGTVAEG | |
| | | ALFNMEVAPEGIVFPFQLRYRGSEDGLPDALKTVLKWW | |
| | | AEGQAFMSGAASTGKGRFRMENAKYETLDLSDENQRND | |
| | | YLKNWGWRDEKGLEELKKRLNSGLPEPGNYRDPKWHEI | |
| | | NVSIEMASPFINGDPIRAAVDKRGTDVVTFVKYKAEGE | |
| | | EAKPVCAYKAESFRGVIRSAVARIHMEDGVPLTELTHS | |
| | | DCECLLCQIFGSEYEAGKIRFEDLVFESDPEPVTFDHV | |
| | | AIDRFTGGAADKKKFDDSPLPGSPARPLMLKGSFWIRR | |
| | | DVLEDEEYCKALGKALADVNNGLYPLGGKSAIGYGQVK | |
| | | SLGIKGDDKRISRLMNPAFDETDVAVPEKPKTDAEVRI | |
| | | EAEKVYYPHYFVEPHKKVEREEKPCGHQKFHEGRLTGK | |
| | | IRCKLITKTPLIVPDTSNDDFFRPADKEARKEKDEYHK | |
| | | SYAFFRLHKQIMIPGSELRGMVSSVYETVTNSCFRIFD | |
| | | ETKRLSWRMDADHQNVLQDFLPGRVTADGKHIQKFSET | |
| | | ARVPFYDKTQKHFDILDEQEIAGEKPVRMWVKRFIKRL | |
| | | SLVDPAKHPQKKQDNKWKRRKEGIATFIEQKNGSYYFN | |
| | | VVTNNGCTSFHLWHKPDNFDQEKLEGIQNGEKLDCWVR | |
| | | DSRYQKAFQEIPENDPDGWECKEGYLHVVGPSKVEFSD | |
| | | KKGDVINNFQGTLPSVPNDWKTIRTNDFKNRKRKNEPV | |
| | | FCCEDDKGNYYTMAKYCETFFFDLKENEEYEIPEKARI | |
| | | KYKELLRVYNNNPQAVPESVFQSRVARENVEKLKSGDL | |
| | | VYFKHNEKYVEDIVPVRISRTVDDRMIGKRMSADLRPC | |
| | | HGDWVEDGDLSALNAYPEKRLLLRHPKGLCPACRLFGT | |
| | | GSYKGRVRFGFASLENDPEWLIPGKNPGDPFHGGPVML | |
| | | SLLERPRPTWSIPGSDNKFKVPGRKFYVHHHAWKTIKD | |
| | | GNHPTTGKAIEQSPNNRTVEALAGGNSFSFEIAFENLK | |
| | | EWELGLLIHSLQLEKGLAHKLGMAKSMGFGSVEIDVES | |
| | | VRLRKDWKQWRNGNSEIPNWLGKGFAKLKEWFRDELDF | |
| | | IENLKKLLWFPEGDQAPRVCYPMLRKKDDPNGNSGYEE | |
| | | LKDGEFKKEDRQKKLTTPWTPWAMAEYLASIFGTEKDK | |
| | | VNCSFYFKIGACRHGDRCSRLHNKPTFSQTIALLNIYR | |
| | | NPQNSSQSADGLRCAVSDVEMQEHYDEFFEEVFTEMEE | |
| | | KYGEVEEMNVCDNLGDHLVGNVYVKFRREEDAEKAVID | |
| | | LNNRWFNGQPLHAELSPVTDFREACCRQYEMGECTRGG | |
| | | FCNEMHLKPISRELRRELYGRRRKKHRSRSRSRERRSR | |
| | | SRDRGRGGGGGGGGGGGGRERDRRRSRDRERSGREMSL | |
| | | YDDLGVETSDSKTEGWSKNFKLLQSQLQVKKAALTQAK | |
| | | SQRTKQSTVLAPVIDLKRGGSSDDRQIVDTPPHVAAGL | |
| | | KDPVPSGFSAGEVLIPLADEYDPMFPNDYEKVVKRQRE | |
| | | ERQRQRELERQKEIEEREKRRKDRHEASGFARRPDPDS | |
| | | DEDEDYERERRKRSMGGAAIAPPTSLVEKDKELPRDFP | |
| | | YEEDSRPRSQSSKAAIPPPVYEEQDRPRSPTGPSNSFL | |
| | | ANMGGTVAHKIMQKYGFREGQGLGKHEQGLSTALSVEK | |
| | | TSKRGGKIIVGDATEKDASKKSDSNPLTEILKCPTKVV | |
| | | LLRNMVGAGEVDEDLEVETKEECEKYGKVGKCVIFEIP | |
| | | GAPDDEAVRIFLEFERVESAIKAVVDLNGRYFGGRVVK | |
| | | ACFYNLDKFRVLDLAEQVKRTADGSEFESPKKKRKV | |
| 513 | Ct- | MKRTADGSEFESPKKKRKVTTTMKISIEFLEPFRMTKW | 2002 |
| | U2AF1- | QESTRRNKNNKEFVRGQAFARWHRNKKDNTKGRPYITG | |
| | SF3B6 | TLLRSAVIRSAENLLTLSDGKISEKTCCPGKFDTEDKD | |
| | | RLLQLRQRSTLRWTDKNPCPDNAETYCPFCELLGRSGN | |
| | | DGKKAEKKDWRFRIHFGNLSLPGKPDFDGPKAIGSQRV | |
| | | LNRVDFKSGKAHDFFKAYEVDHTRFPRFEGEITIDNKV | |
| | | SAEARKLLCDSLKFTDRLCGALCVIRFDEYTPAADSGK | |
| | | QTENVQAEPNANLAEKTAEQIISILDDNKKTEYTRLLA | |
| | | DAIRSLRRSSKLVAGLPKDHDGKDDHYLWDIGKKKKDE | |
| | | NSVTIRQILTTSADTKELKNAGKWREFCEKLGEALYLK | |
| | | SKDMSGGLKITRRILGDAEFHGKPDRLEKSRSVSIGSV | |
| | | LKETVVCGELVAKTPFFFGAIDEDAKQTDLQVLLTPDN | |
| | | KYRLPRSAVRGILRRDLQTYFDSPCNAELGGRPCMCKT | |
| | | CRIMRGITVMDARSEYNAPPEIRHRTRINPFTGTVAEG | |
| | | ALFNMEVAPEGIVFPFQLRYRGSEDGLPDALKTVLKWW | |
| | | AEGQAFMSGAASTGKGRFRMENAKYETLDLSDENQRND | |
| | | YLKNWGWRDEKGLEELKKRLNSGLPEPGNYRDPKWHEI | |
| | | NVSIEMASPFINGDPIRAAVDKRGTDVVTFVKYKAEGE | |
| | | EAKPVCAYKAESFRGVIRSAVARIHMEDGVPLTELTHS | |
| | | DCECLLCQIFGSEYEAGKIRFEDLVFESDPEPVTFDHV | |
| | | AIDRFTGGAADKKKFDDSPLPGSPARPLMLKGSFWIRR | |
| | | DVLEDEEYCKALGKALADVNNGLYPLGGKSAIGYGQVK | |
| | | SLGIKGDDKRISRLMNPAFDETDVAVPEKPKTDAEVRI | |
| | | EAEKVYYPHYFVEPHKKVEREEKPCGHQKFHEGRLTGK | |
| | | IRCKLITKTPLIVPDTSNDDFFRPADKEARKEKDEYHK | |
| | | SYAFFRLHKQIMIPGSELRGMVSSVYETVTNSCFRIFD | |
| | | ETKRLSWRMDADHQNVLQDFLPGRVTADGKHIQKFSET | |
| | | ARVPFYDKTQKHFDILDEQEIAGEKPVRMWVKRFIKRL | |
| | | SLVDPAKHPQKKQDNKWKRRKEGIATFIEQKNGSYYFN | |
| | | VVTNNGCTSFHLWHKPDNFDQEKLEGIQNGEKLDCWVR | |
| | | DSRYQKAFQEIPENDPDGWECKEGYLHVVGPSKVEFSD | |
| | | KKGDVINNFQGTLPSVPNDWKTIRTNDFKNRKRKNEPV | |
| | | FCCEDDKGNYYTMAKYCETFFFDLKENEEYEIPEKARI | |
| | | KYKELLRVYNNNPQAVPESVFQSRVARENVEKLKSGDL | |
| | | VYFKHNEKYVEDIVPVRISRTVDDRMIGKRMSADLRPC | |
| | | HGDWVEDGDLSALNAYPEKRLLLRHPKGLCPACRLFGT | |
| | | GSYKGRVRFGFASLENDPEWLIPGKNPGDPFHGGPVML | |
| | | SLLERPRPTWSIPGSDNKFKVPGRKFYVHHHAWKTIKD | |
| | | GNHPTTGKAIEQSPNNRTVEALAGGNSFSFEIAFENLK | |
| | | EWELGLLIHSLQLEKGLAHKLGMAKSMGFGSVEIDVES | |
| | | VRLRKDWKQWRNGNSEIPNWLGKGFAKLKEWFRDELDF | |
| | | IENLKKLLWFPEGDQAPRVCYPMLRKKDDPNGNSGYEE | |
| | | LKDGEFKKEDRQKKLTTPWTPWAMAEYLASIFGTEKDK | |
| | | VNCSFYFKIGACRHGDRCSRLHNKPTFSQTIALLNIYR | |
| | | NPQNSSQSADGLRCAVSDVEMQEHYDEFFEEVFTEMEE | |
| | | KYGEVEEMNVCDNLGDHLVGNVYVKFRREEDAEKAVID | |
| | | LNNRWFNGQPLHAELSPVTDFREACCRQYEMGECTRGG | |
| | | FCNEMHLKPISRELRRELYGRRRKKHRSRSRSRERRSR | |
| | | SRDRGRGGGGGGGGGGGGRERDRRRSRDRERSGRFMAM | |
| | | QAAKRANIRLPPEVNRILYIRNLPYKITAEEMYDIFGK | |
| | | YGPIRQIRVGNTPETRGTAYVVYEDIFDAKNACDHLSG | |
| | | FNVCNRYLVVLYYNANRAFQKMDTKKKEEQLKLLKEKY | |
| | | GINTDPPKKRTADGSEFESPKKKRKV | |
| 514 | Ct- | MKRTADGSEFESPKKKRKVTTTMKISIEFLEPFRMTKW | 2352 |
| | U2AF1- | QESTRRNKNNKEFVRGQAFARWHRNKKDNTKGRPYITG | |
| | U2AF2 | TLLRSAVIRSAENLLTLSDGKISEKTCCPGKFDTEDKD | |
| | | RLLQLRQRSTLRWTDKNPCPDNAETYCPFCELLGRSGN | |
| | | DGKKAEKKDWRFRIHFGNLSLPGKPDFDGPKAIGSQRV | |
| | | LNRVDFKSGKAHDFFKAYEVDHTRFPRFEGEITIDNKV | |
| | | SAEARKLLCDSLKFTDRLCGALCVIRFDEYTPAADSGK | |
| | | QTENVQAEPNANLAEKTAEQIISILDDNKKTEYTRLLA | |
| | | DAIRSLRRSSKLVAGLPKDHDGKDDHYLWDIGKKKKDE | |
| | | NSVTIRQILTTSADTKELKNAGKWREFCEKLGEALYLK | |
| | | SKDMSGGLKITRRILGDAEFHGKPDRLEKSRSVSIGSV | |
| | | LKETVVCGELVAKTPFFFGAIDEDAKQTDLQVLLTPDN | |
| | | KYRLPRSAVRGILRRDLQTYFDSPCNAELGGRPCMCKT | |
| | | CRIMRGITVMDARSEYNAPPEIRHRTRINPFTGTVAEG | |
| | | ALFNMEVAPEGIVFPFQLRYRGSEDGLPDALKTVLKWW | |
| | | AEGQAFMSGAASTGKGRFRMENAKYETLDLSDENQRND | |
| | | YLKNWGWRDEKGLEELKKRLNSGLPEPGNYRDPKWHEI | |
| | | NVSIEMASPFINGDPIRAAVDKRGTDVVTFVKYKAEGE | |
| | | EAKPVCAYKAESFRGVIRSAVARIHMEDGVPLTELTHS | |
| | | DCECLLCQIFGSEYEAGKIRFEDLVFESDPEPVTFDHV | |
| | | AIDRFTGGAADKKKFDDSPLPGSPARPLMLKGSFWIRR | |
| | | DVLEDEEYCKALGKALADVNNGLYPLGGKSAIGYGQVK | |
| | | SLGIKGDDKRISRLMNPAFDETDVAVPEKPKTDAEVRI | |
| | | EAEKVYYPHYFVEPHKKVEREEKPCGHQKFHEGRLTGK | |
| | | IRCKLITKTPLIVPDTSNDDFFRPADKEARKEKDEYHK | |
| | | SYAFFRLHKQIMIPGSELRGMVSSVYETVTNSCFRIFD | |
| | | ETKRLSWRMDADHQNVLQDFLPGRVTADGKHIQKFSET | |
| | | ARVPFYDKTQKHFDILDEQEIAGEKPVRMWVKRFIKRL | |
| | | SLVDPAKHPQKKQDNKWKRRKEGIATFIEQKNGSYYFN | |
| | | VVTNNGCTSFHLWHKPDNFDQEKLEGIQNGEKLDCWVR | |
| | | DSRYQKAFQEIPENDPDGWECKEGYLHVVGPSKVEFSD | |
| | | KKGDVINNFQGTLPSVPNDWKTIRTNDFKNRKRKNEPV | |
| | | FCCEDDKGNYYTMAKYCETFFFDLKENEEYEIPEKARI | |
| | | KYKELLRVYNNNPQAVPESVFQSRVARENVEKLKSGDL | |
| | | VYFKHNEKYVEDIVPVRISRTVDDRMIGKRMSADLRPC | |
| | | HGDWVEDGDLSALNAYPEKRLLLRHPKGLCPACRLFGT | |
| | | GSYKGRVRFGFASLENDPEWLIPGKNPGDPFHGGPVML | |
| | | SLLERPRPTWSIPGSDNKFKVPGRKFYVHHHAWKTIKD | |
| | | GNHPTTGKAIEQSPNNRTVEALAGGNSFSFEIAFENLK | |
| | | EWELGLLIHSLQLEKGLAHKLGMAKSMGFGSVEIDVES | |
| | | VRLRKDWKQWRNGNSEIPNWLGKGFAKLKEWFRDELDF | |
| | | IENLKKLLWFPEGDQAPRVCYPMLRKKDDPNGNSGYEE | |
| | | LKDGEFKKEDRQKKLTTPWTPWAMAEYLASIFGTEKDK | |
| | | VNCSFYFKIGACRHGDRCSRLHNKPTFSQTIALLNIYR | |
| | | NPQNSSQSADGLRCAVSDVEMQEHYDEFFEEVFTEMEE | |
| | | KYGEVEEMNVCDNLGDHLVGNVYVKFRREEDAEKAVID | |
| | | LNNRWFNGQPLHAELSPVTDFREACCRQYEMGECTRGG | |
| | | FCNFMHLKPISRELRRELYGRRRKKHRSRSRSRERRSR | |
| | | SRDRGRGGGGGGGGGGGGRERDRRRSRDRERSGRFMSD | |
| | | FDEFERQLNENKQERDKENRHRKRSHSRSRSRDRKRRS | |
| | | RSRDRRNRDQRSASRDRRRRSKPLTRGAKEEHGGLIRS | |
| | | PRHEKKKKVRKYWDVPPPGFEHITPMQYKAMQAAGQIP | |
| | | ATALLPTMTPDGLAVTPTPVPVVGSQMTRQARRLYVGN | |
| | | IPFGITEEAMMDFFNAQMRLGGLTQAPGNPVLAVQINQ | |
| | | DKNFAFLEFRSVDETTQAMAFDGIIFQGQSLKIRRPHD | |
| | | YQPLPGMSENPSVYVPGVVSTVVPDSAHKLFIGGLPNY | |
| | | LNDDQVKELLTSFGPLKAFNLVKDSATGLSKGYAFCEY | |
| | | VDINVTDQAIAGLNGMQLGDKKLLVQRASVGAKNATLV | |
| | | SPPSTINQTPVTLQVPGLMSSQVQMGGHPTEVLCLMNM | |
| | | VLPEELLDDEEYEEIVEDVRDECSKYGLVKSIEIPRPV | |
| | | DGVEVPGCGKIFVEFTSVEDCQKAMQGLTGRKFANRVV | |
| | | VTKYCDPDSYHRRDFWKRTADGSEFESPKKKRKV | |
| 515 | Nt-Ct- | MKRTADGSEFESPKKKRKVMAMQAAKRANIRLPPEVNR | 1887 |
| | SF3B6 | ILYIRNLPYKITAEEMYDIFGKYGPIRQIRVGNTPETR | |
| | | GTAYVVYEDIFDAKNACDHLSGFNVCNRYLVVLYYNAN | |
| | | RAFQKMDTKKKEEQLKLLKEKYGINTDPPKTTTMKISI | |
| | | EFLEPFRMTKWQESTRRNKNNKEFVRGQAFARWHRNKK | |
| | | DNTKGRPYITGTLLRSAVIRSAENLLTLSDGKISEKTC | |
| | | CPGKFDTEDKDRLLQLRQRSTLRWTDKNPCPDNAETYC | |
| | | PFCELLGRSGNDGKKAEKKDWRFRIHFGNLSLPGKPDF | |
| | | DGPKAIGSQRVLNRVDFKSGKAHDFFKAYEVDHTRFPR | |
| | | FEGEITIDNKVSAEARKLLCDSLKFTDRLCGALCVIRF | |
| | | DEYTPAADSGKQTENVQAEPNANLAEKTAEQIISILDD | |
| | | NKKTEYTRLLADAIRSLRRSSKLVAGLPKDHDGKDDHY | |
| | | LWDIGKKKKDENSVTIRQILTTSADTKELKNAGKWREF | |
| | | CEKLGEALYLKSKDMSGGLKITRRILGDAEFHGKPDRL | |
| | | EKSRSVSIGSVLKETVVCGELVAKTPFFFGAIDEDAKQ | |
| | | TDLQVLLTPDNKYRLPRSAVRGILRRDLQTYFDSPCNA | |
| | | ELGGRPCMCKTCRIMRGITVMDARSEYNAPPEIRHRTR | |
| | | INPFTGTVAEGALFNMEVAPEGIVFPFQLRYRGSEDGL | |
| | | PDALKTVLKWWAEGQAFMSGAASTGKGRFRMENAKYET | |
| | | LDLSDENQRNDYLKNWGWRDEKGLEELKKRLNSGLPEP | |
| | | GNYRDPKWHEINVSIEMASPFINGDPIRAAVDKRGTDV | |
| | | VTFVKYKAEGEEAKPVCAYKAESFRGVIRSAVARIHME | |
| | | DGVPLTELTHSDCECLLCQIFGSEYEAGKIRFEDLVFE | |
| | | SDPEPVTFDHVAIDRFTGGAADKKKFDDSPLPGSPARP | |
| | | LMLKGSFWIRRDVLEDEEYCKALGKALADVNNGLYPLG | |
| | | GKSAIGYGQVKSLGIKGDDKRISRLMNPAFDETDVAVP | |
| | | EKPKTDAEVRIEAEKVYYPHYFVEPHKKVEREEKPCGH | |
| | | QKFHEGRLTGKIRCKLITKTPLIVPDTSNDDFFRPADK | |
| | | EARKEKDEYHKSYAFFRLHKQIMIPGSELRGMVSSVYE | |
| | | TVTNSCFRIFDETKRLSWRMDADHQNVLQDFLPGRVTA | |
| | | DGKHIQKFSETARVPFYDKTQKHFDILDEQEIAGEKPV | |
| | | RMWVKRFIKRLSLVDPAKHPQKKQDNKWKRRKEGIATF | |
| | | IEQKNGSYYFNVVTNNGCTSFHLWHKPDNFDQEKLEGI | |
| | | QNGEKLDCWVRDSRYQKAFQEIPENDPDGWECKEGYLH | |
| | | VVGPSKVEFSDKKGDVINNFQGTLPSVPNDWKTIRTND | |
| | | FKNRKRKNEPVFCCEDDKGNYYTMAKYCETFFFDLKEN | |
| | | EEYEIPEKARIKYKELLRVYNNNPQAVPESVFQSRVAR | |
| | | ENVEKLKSGDLVYFKHNEKYVEDIVPVRISRTVDDRMI | |
| | | GKRMSADLRPCHGDWVEDGDLSALNAYPEKRLLLRHPK | |
| | | GLCPACRLFGTGSYKGRVRFGFASLENDPEWLIPGKNP | |
| | | GDPFHGGPVMLSLLERPRPTWSIPGSDNKFKVPGRKFY | |
| | | VHHHAWKTIKDGNHPTTGKAIEQSPNNRTVEALAGGNS | |
| | | FSFEIAFENLKEWELGLLIHSLQLEKGLAHKLGMAKSM | |
| | | GFGSVEIDVESVRLRKDWKQWRNGNSEIPNWLGKGFAK | |
| | | LKEWFRDELDFIENLKKLLWFPEGDQAPRVCYPMLRKK | |
| | | DDPNGNSGYEELKDGEFKKEDRQKKLTTPWTPWAMAMQ | |
| | | AAKRANIRLPPEVNRILYIRNLPYKITAEEMYDIFGKY | |
| | | GPIRQIRVGNTPETRGTAYVVYEDIFDAKNACDHLSGE | |
| | | NVCNRYLVVLYYNANRAFQKMDTKKKEEQLKLLKEKYG | |
| | | INTDPPKKRTADGSEFESPKKKRKV | |
| 516 | Nt-Ct- | MKRTADGSEFESPKKKRKVMAEYLASIFGTEKDKVNCS | 2117 |
| | U2AF1 | FYFKIGACRHGDRCSRLHNKPTFSQTIALLNIYRNPQN | |
| | | SSQSADGLRCAVSDVEMQEHYDEFFEEVFTEMEEKYGE | |
| | | VEEMNVCDNLGDHLVGNVYVKFRREEDAEKAVIDLNNR | |
| | | WFNGQPIHAELSPVTDFREACCRQYEMGECTRGGFCNF | |
| | | MHLKPISRELRRELYGRRRKKHRSRSRSRERRSRSRDR | |
| | | GRGGGGGGGGGGGGRERDRRRSRDRERSGRFTTTMKIS | |
| | | IEFLEPFRMTKWQESTRRNKNNKEFVRGQAFARWHRNK | |
| | | KDNTKGRPYITGTLLRSAVIRSAENLLTLSDGKISEKT | |
| | | CCPGKFDTEDKDRLLQLRQRSTLRWTDKNPCPDNAETY | |
| | | CPFCELLGRSGNDGKKAEKKDWRFRIHFGNLSLPGKPD | |
| | | FDGPKAIGSQRVLNRVDFKSGKAHDFFKAYEVDHTRFP | |
| | | RFEGEITIDNKVSAEARKLLCDSLKFTDRLCGALCVIR | |
| | | FDEYTPAADSGKQTENVQAEPNANLAEKTAEQIISILD | |
| | | DNKKTEYTRLLADAIRSLRRSSKLVAGLPKDHDGKDDH | |
| | | YLWDIGKKKKDENSVTIRQILTTSADTKELKNAGKWRE | |
| | | FCEKLGEALYLKSKDMSGGLKITRRILGDAEFHGKPDR | |
| | | LEKSRSVSIGSVLKETVVCGELVAKTPFFFGAIDEDAK | |
| | | QTDLQVLLTPDNKYRLPRSAVRGILRRDLQTYFDSPCN | |
| | | AELGGRPCMCKTCRIMRGITVMDARSEYNAPPEIRHRT | |
| | | RINPFTGTVAEGALFNMEVAPEGIVFPFQLRYRGSEDG | |
| | | LPDALKTVLKWWAEGQAFMSGAASTGKGRFRMENAKYE | |
| | | TLDLSDENQRNDYLKNWGWRDEKGLEELKKRLNSGLPE | |
| | | PGNYRDPKWHEINVSIEMASPFINGDPIRAAVDKRGTD | |
| | | VVTFVKYKAEGEEAKPVCAYKAESFRGVIRSAVARIHM | |
| | | EDGVPLTELTHSDCECLLCQIFGSEYEAGKIRFEDLVF | |
| | | ESDPEPVTFDHVAIDRFTGGAADKKKFDDSPLPGSPAR | |
| | | PLMLKGSFWIRRDVLEDEEYCKALGKALADVNNGLYPL | |
| | | GGKSAIGYGQVKSLGIKGDDKRISRLMNPAFDETDVAV | |
| | | PEKPKTDAEVRIEAEKVYYPHYFVEPHKKVEREEKPCG | |
| | | HQKFHEGRLTGKIRCKLITKTPLIVPDTSNDDFFRPAD | |
| | | KEARKEKDEYHKSYAFFRLHKQIMIPGSELRGMVSSVY | |
| | | ETVTNSCFRIFDETKRLSWRMDADHQNVLQDFLPGRVT | |
| | | ADGKHIQKFSETARVPFYDKTQKHFDILDEQEIAGEKP | |
| | | VRMWVKRFIKRLSLVDPAKHPQKKQDNKWKRRKEGIAT | |
| | | FIEQKNGSYYFNVVTNNGCTSFHLWHKPDNFDQEKLEG | |
| | | IQNGEKLDCWVRDSRYQKAFQEIPENDPDGWECKEGYL | |
| | | HVVGPSKVEFSDKKGDVINNFQGTLPSVPNDWKTIRTN | |
| | | DFKNRKRKNEPVFCCEDDKGNYYTMAKYCETFFFDLKE | |
| | | NEEYEIPEKARIKYKELLRVYNNNPQAVPESVFQSRVA | |
| | | RENVEKLKSGDLVYFKHNEKYVEDIVPVRISRTVDDRM | |
| | | IGKRMSADLRPCHGDWVEDGDLSALNAYPEKRLLLRHP | |
| | | KGLCPACRLFGTGSYKGRVRFGFASLENDPEWLIPGKN | |
| | | PGDPFHGGPVMLSLLERPRPTWSIPGSDNKFKVPGRKF | |
| | | YVHHHAWKTIKDGNHPTTGKAIEQSPNNRTVEALAGGN | |
| | | SFSFEIAFENLKEWELGLLIHSLQLEKGLAHKLGMAKS | |
| | | MGFGSVEIDVESVRLRKDWKQWRNGNSEIPNWLGKGFA | |
| | | KLKEWFRDELDFIENLKKLLWFPEGDQAPRVCYPMLRK | |
| | | KDDPNGNSGYEELKDGEFKKEDRQKKLTTPWTPWAMAE | |
| | | YLASIFGTEKDKVNCSFYFKIGACRHGDRCSRLHNKPT | |
| | | FSQTIALLNIYRNPQNSSQSADGLRCAVSDVEMQEHYD | |
| | | EFFEEVFTEMEEKYGEVEEMNVCDNLGDHLVGNVYVKF | |
| | | RREEDAEKAVIDLNNRWFNGQPIHAELSPVTDFREACC | |
| | | RQYEMGECTRGGFCNEMHLKPISRELRRELYGRRRKKH | |
| | | RSRSRSRERRSRSRDRGRGGGGGGGGGGGGRERDRRRS | |
| | | RDRERSGRFKRTADGSEFESPKKKRKV | |
| 517 | Nt- | MKRTADGSEFESPKKKRKVMSLYDDLGVETSDSKTEGW | 2278 |
| | RBM17- | SKNFKLLQSQLQVKKAALTQAKSQRTKQSTVLAPVIDL | |
| | Ct- | KRGGSSDDRQIVDTPPHVAAGLKDPVPSGFSAGEVLIP | |
| | U2AF1 | LADEYDPMFPNDYEKVVKRQREERQRQRELERQKEIEE | |
| | | REKRRKDRHEASGFARRPDPDSDEDEDYERERRKRSMG | |
| | | GAAIAPPTSLVEKDKELPRDFPYEEDSRPRSQSSKAAI | |
| | | PPPVYEEQDRPRSPTGPSNSFLANMGGTVAHKIMQKYG | |
| | | FREGQGLGKHEQGLSTALSVEKTSKRGGKIIVGDATEK | |
| | | DASKKSDSNPLTEILKCPTKVVLLRNMVGAGEVDEDLE | |
| | | VETKEECEKYGKVGKCVIFEIPGAPDDEAVRIFLEFER | |
| | | VESAIKAVVDLNGRYFGGRVVKACFYNLDKFRVLDLAE | |
| | | QVITTMKISIEFLEPFRMTKWQESTRRNKNNKEFVRGQ | |
| | | AFARWHRNKKDNTKGRPYITGTLLRSAVIRSAENLLTL | |
| | | SDGKISEKTCCPGKFDTEDKDRLLQLRQRSTLRWTDKN | |
| | | PCPDNAETYCPFCELLGRSGNDGKKAEKKDWRFRIHFG | |
| | | NLSLPGKPDFDGPKAIGSQRVLNRVDFKSGKAHDFFKA | |
| | | YEVDHTRFPRFEGEITIDNKVSAEARKLLCDSLKFTDR | |
| | | LCGALCVIRFDEYTPAADSGKQTENVQAEPNANLAEKT | |
| | | AEQIISILDDNKKTEYTRLLADAIRSLRRSSKLVAGLP | |
| | | KDHDGKDDHYLWDIGKKKKDENSVTIRQILTTSADTKE | |
| | | LKNAGKWREFCEKLGEALYLKSKDMSGGLKITRRILGD | |
| | | AEFHGKPDRLEKSRSVSIGSVLKETVVCGELVAKTPFF | |
| | | FGAIDEDAKQTDLQVLLTPDNKYRLPRSAVRGILRRDL | |
| | | QTYFDSPCNAELGGRPCMCKTCRIMRGITVMDARSEYN | |
| | | APPEIRHRTRINPFTGTVAEGALFNMEVAPEGIVFPFQ | |
| | | LRYRGSEDGLPDALKTVLKWWAEGQAFMSGAASTGKGR | |
| | | FRMENAKYETLDLSDENQRNDYLKNWGWRDEKGLEELK | |
| | | KRLNSGLPEPGNYRDPKWHEINVSIEMASPFINGDPIR | |
| | | AAVDKRGTDVVTFVKYKAEGEEAKPVCAYKAESFRGVI | |
| | | RSAVARIHMEDGVPLTELTHSDCECLLCQIFGSEYEAG | |
| | | KIRFEDLVFESDPEPVTFDHVAIDRFTGGAADKKKFDD | |
| | | SPLPGSPARPLMLKGSFWIRRDVLEDEEYCKALGKALA | |
| | | DVNNGLYPLGGKSAIGYGQVKSLGIKGDDKRISRLMNP | |
| | | AFDETDVAVPEKPKTDAEVRIEAEKVYYPHYFVEPHKK | |
| | | VEREEKPCGHQKFHEGRLTGKIRCKLITKTPLIVPDTS | |
| | | NDDFFRPADKEARKEKDEYHKSYAFFRLHKQIMIPGSE | |
| | | LRGMVSSVYETVTNSCFRIFDETKRLSWRMDADHQNVL | |
| | | QDFLPGRVTADGKHIQKFSETARVPFYDKTQKHFDILD | |
| | | EQEIAGEKPVRMWVKRFIKRLSLVDPAKHPQKKQDNKW | |
| | | KRRKEGIATFIEQKNGSYYFNVVTNNGCTSFHLWHKPD | |
| | | NFDQEKLEGIQNGEKLDCWVRDSRYQKAFQEIPENDPD | |
| | | GWECKEGYLHVVGPSKVEFSDKKGDVINNFQGTLPSVP | |
| | | NDWKTIRTNDFKNRKRKNEPVFCCEDDKGNYYTMAKYC | |
| | | ETFFFDLKENEEYEIPEKARIKYKELLRVYNNNPQAVP | |
| | | ESVFQSRVARENVEKLKSGDLVYFKHNEKYVEDIVPVR | |
| | | ISRTVDDRMIGKRMSADLRPCHGDWVEDGDLSALNAYP | |
| | | EKRLLLRHPKGLCPACRLFGTGSYKGRVRFGFASLEND | |
| | | PEWLIPGKNPGDPFHGGPVMLSLLERPRPTWSIPGSDN | |
| | | KFKVPGRKFYVHHHAWKTIKDGNHPTTGKAIEQSPNNR | |
| | | TVEALAGGNSFSFEIAFENLKEWELGLLIHSLQLEKGL | |
| | | AHKLGMAKSMGFGSVEIDVESVRLRKDWKQWRNGNSEI | |
| | | PNWLGKGFAKLKEWFRDELDFIENLKKLLWFPEGDQAP | |
| | | RVCYPMLRKKDDPNGNSGYEELKDGEFKKEDRQKKLTT | |
| | | PWTPWAMAEYLASIFGTEKDKVNCSFYFKIGACRHGDR | |
| | | CSRLHNKPTFSQTIALLNIYRNPQNSSQSADGLRCAVS | |
| | | DVEMQEHYDEFFEEVFTEMEEKYGEVEEMNVCDNLGDH | |
| | | LVGNVYVKFRREEDAEKAVIDLNNRWFNGQPLHAELSP | |
| | | VTDFREACCRQYEMGECTRGGFCNFMHLKPISRELRRE | |
| | | LYGRRRKKHRSRSRSRERRSRSRDRGRGGGGGGGGGGG | |
| | | GRERDRRRSRDRERSGRFKRTADGSEFESPKKKRKV | |
| 518 | Nt- | MKRTADGSEFESPKKKRKVMAMQAAKRANIRLPPEVNR | 2002 |
| | SF3B6- | ILYIRNLPYKITAEEMYDIFGKYGPIRQIRVGNTPETR | |
| | Ct- | GTAYVVYEDIFDAKNACDHLSGFNVCNRYLVVLYYNAN | |
| | U2AF1 | RAFQKMDTKKKEEQLKLLKEKYGINTDPPKTTTMKISI | |
| | | EFLEPFRMTKWQESTRRNKNNKEFVRGQAFARWHRNKK | |
| | | DNTKGRPYITGTLLRSAVIRSAENLLTLSDGKISEKTC | |
| | | CPGKFDTEDKDRLLQLRQRSTLRWTDKNPCPDNAETYC | |
| | | PFCELLGRSGNDGKKAEKKDWRFRIHFGNLSLPGKPDF | |
| | | DGPKAIGSQRVLNRVDFKSGKAHDFFKAYEVDHTRFPR | |
| | | FEGEITIDNKVSAEARKLLCDSLKFTDRLCGALCVIRF | |
| | | DEYTPAADSGKQTENVQAEPNANLAEKTAEQIISILDD | |
| | | NKKTEYTRLLADAIRSLRRSSKLVAGLPKDHDGKDDHY | |
| | | LWDIGKKKKDENSVTIRQILTTSADTKELKNAGKWREF | |
| | | CEKLGEALYLKSKDMSGGLKITRRILGDAEFHGKPDRL | |
| | | EKSRSVSIGSVLKETVVCGELVAKTPFFFGAIDEDAKQ | |
| | | TDLQVLLTPDNKYRLPRSAVRGILRRDLQTYFDSPCNA | |
| | | ELGGRPCMCKTCRIMRGITVMDARSEYNAPPEIRHRTR | |
| | | INPFTGTVAEGALFNMEVAPEGIVFPFQLRYRGSEDGL | |
| | | PDALKTVLKWWAEGQAFMSGAASTGKGRFRMENAKYET | |
| | | LDLSDENQRNDYLKNWGWRDEKGLEELKKRLNSGLPEP | |
| | | GNYRDPKWHEINVSIEMASPFINGDPIRAAVDKRGTDV | |
| | | VTFVKYKAEGEEAKPVCAYKAESFRGVIRSAVARIHME | |
| | | DGVPLTELTHSDCECLLCQIFGSEYEAGKIRFEDLVFE | |
| | | SDPEPVTFDHVAIDRFTGGAADKKKEDDSPLPGSPARP | |
| | | LMLKGSFWIRRDVLEDEEYCKALGKALADVNNGLYPLG | |
| | | GKSAIGYGQVKSLGIKGDDKRISRLMNPAFDETDVAVP | |
| | | EKPKTDAEVRIEAEKVYYPHYFVEPHKKVEREEKPCGH | |
| | | QKFHEGRLTGKIRCKLITKTPLIVPDTSNDDFFRPADK | |
| | | EARKEKDEYHKSYAFFRLHKQIMIPGSELRGMVSSVYE | |
| | | TVTNSCFRIFDETKRLSWRMDADHQNVLQDFLPGRVTA | |
| | | DGKHIQKFSETARVPFYDKTQKHFDILDEQEIAGEKPV | |
| | | RMWVKRFIKRLSLVDPAKHPQKKQDNKWKRRKEGIATF | |
| | | IEQKNGSYYFNVVTNNGCTSFHLWHKPDNFDQEKLEGI | |
| | | QNGEKLDCWVRDSRYQKAFQEIPENDPDGWECKEGYLH | |
| | | VVGPSKVEFSDKKGDVINNFQGTLPSVPNDWKTIRTND | |
| | | FKNRKRKNEPVFCCEDDKGNYYTMAKYCETFFFDLKEN | |
| | | EEYEIPEKARIKYKELLRVYNNNPQAVPESVFQSRVAR | |
| | | ENVEKLKSGDLVYFKHNEKYVEDIVPVRISRTVDDRMI | |
| | | GKRMSADLRPCHGDWVEDGDLSALNAYPEKRLLLRHPK | |
| | | GLCPACRLFGTGSYKGRVRFGFASLENDPEWLIPGKNP | |
| | | GDPFHGGPVMLSLLERPRPTWSIPGSDNKFKVPGRKFY | |
| | | VHHHAWKTIKDGNHPTTGKAIEQSPNNRTVEALAGGNS | |
| | | FSFEIAFENLKEWELGLLIHSLQLEKGLAHKLGMAKSM | |
| | | GFGSVEIDVESVRLRKDWKQWRNGNSEIPNWLGKGFAK | |
| | | LKEWFRDELDFIENLKKLLWFPEGDQAPRVCYPMLRKK | |
| | | DDPNGNSGYEELKDGEFKKEDRQKKLTTPWTPWAMAEY | |
| | | LASIFGTEKDKVNCSFYFKIGACRHGDRCSRLHNKPTF | |
| | | SQTIALLNIYRNPQNSSQSADGLRCAVSDVEMQEHYDE | |
| | | FFEEVFTEMEEKYGEVEEMNVCDNLGDHLVGNVYVKFR | |
| | | REEDAEKAVIDLNNRWFNGQPLHAELSPVTDFREACCR | |
| | | QYEMGECTRGGFCNFMHLKPISRELRRELYGRRRKKHR | |
| | | SRSRSRERRSRSRDRGRGGGGGGGGGGGGRERDRRRSR | |
| | | DRERSGRFKRTADGSEFESPKKKRKV | |
| 519 | Nt- | MKRTADGSEFESPKKKRKVMAEYLASIFGTEKDKVNCS | 2002 |
| | U2AF1- | FYFKIGACRHGDRCSRLHNKPTFSQTIALLNIYRNPQN | |
| | Ct- | SSQSADGLRCAVSDVEMQEHYDEFFEEVFTEMEEKYGE | |
| | SF3B6 | VEEMNVCDNLGDHLVGNVYVKFRREEDAEKAVIDLNNR | |
| | | WFNGQPLHAELSPVTDFREACCRQYEMGECTRGGFCNF | |
| | | MHLKPISRELRRELYGRRRKKHRSRSRSRERRSRSRDR | |
| | | GRGGGGGGGGGGGGRERDRRRSRDRERSGRFTTTMKIS | |
| | | IEFLEPFRMTKWQESTRRNKNNKEFVRGQAFARWHRNK | |
| | | KDNTKGRPYITGTLLRSAVIRSAENLLTLSDGKISEKT | |
| | | CCPGKFDTEDKDRLLQLRQRSTLRWTDKNPCPDNAETY | |
| | | CPFCELLGRSGNDGKKAEKKDWRFRIHFGNLSLPGKPD | |
| | | FDGPKAIGSQRVLNRVDFKSGKAHDFFKAYEVDHTRFP | |
| | | RFEGEITIDNKVSAEARKLLCDSLKFTDRLCGALCVIR | |
| | | FDEYTPAADSGKQTENVQAEPNANLAEKTAEQIISILD | |
| | | DNKKTEYTRLLADAIRSLRRSSKLVAGLPKDHDGKDDH | |
| | | YLWDIGKKKKDENSVTIRQILTTSADTKELKNAGKWRE | |
| | | FCEKLGEALYLKSKDMSGGLKITRRILGDAEFHGKPDR | |
| | | LEKSRSVSIGSVLKETVVCGELVAKTPFFFGAIDEDAK | |
| | | QTDLQVLLTPDNKYRLPRSAVRGILRRDLQTYFDSPCN | |
| | | AELGGRPCMCKTCRIMRGITVMDARSEYNAPPEIRHRT | |
| | | RINPFTGTVAEGALFNMEVAPEGIVFPFQLRYRGSEDG | |
| | | LPDALKTVLKWWAEGQAFMSGAASTGKGRFRMENAKYE | |
| | | TLDLSDENQRNDYLKNWGWRDEKGLEELKKRLNSGLPE | |
| | | PGNYRDPKWHEINVSIEMASPFINGDPIRAAVDKRGTD | |
| | | VVTFVKYKAEGEEAKPVCAYKAESFRGVIRSAVARIHM | |
| | | EDGVPLTELTHSDCECLLCQIFGSEYEAGKIRFEDLVF | |
| | | ESDPEPVTFDHVAIDRFTGGAADKKKEDDSPLPGSPAR | |
| | | PLMLKGSFWIRRDVLEDEEYCKALGKALADVNNGLYPL | |
| | | GGKSAIGYGQVKSLGIKGDDKRISRLMNPAFDETDVAV | |
| | | PEKPKTDAEVRIEAEKVYYPHYFVEPHKKVEREEKPCG | |
| | | HQKFHEGRLTGKIRCKLITKTPLIVPDTSNDDFFRPAD | |
| | | KEARKEKDEYHKSYAFFRLHKQIMIPGSELRGMVSSVY | |
| | | ETVTNSCFRIFDETKRLSWRMDADHQNVLQDFLPGRVT | |
| | | ADGKHIQKFSETARVPFYDKTQKHFDILDEQEIAGEKP | |
| | | VRMWVKRFIKRLSLVDPAKHPQKKQDNKWKRRKEGIAT | |
| | | FIEQKNGSYYFNVVTNNGCTSFHLWHKPDNFDQEKLEG | |
| | | IQNGEKLDCWVRDSRYQKAFQEIPENDPDGWECKEGYL | |
| | | HVVGPSKVEFSDKKGDVINNFQGTLPSVPNDWKTIRTN | |
| | | DFKNRKRKNEPVFCCEDDKGNYYTMAKYCETFFFDLKE | |
| | | NEEYEIPEKARIKYKELLRVYNNNPQAVPESVFQSRVA | |
| | | RENVEKLKSGDLVYFKHNEKYVEDIVPVRISRTVDDRM | |
| | | IGKRMSADLRPCHGDWVEDGDLSALNAYPEKRLLLRHP | |
| | | KGLCPACRLFGTGSYKGRVRFGFASLENDPEWLIPGKN | |
| | | PGDPFHGGPVMLSLLERPRPTWSIPGSDNKFKVPGRKF | |
| | | YVHHHAWKTIKDGNHPTTGKAIEQSPNNRTVEALAGGN | |
| | | SFSFEIAFENLKEWELGLLIHSLQLEKGLAHKLGMAKS | |
| | | MGFGSVEIDVESVRLRKDWKQWRNGNSEIPNWLGKGFA | |
| | | KLKEWFRDELDFIENLKKLLWFPEGDQAPRVCYPMLRK | |
| | | KDDPNGNSGYEELKDGEFKKEDRQKKLTTPWTPWAMAM | |
| | | QAAKRANIRLPPEVNRILYIRNLPYKITAEEMYDIFGK | |
| | | YGPIRQIRVGNTPETRGTAYVVYEDIFDAKNACDHLSG | |
| | | FNVCNRYLVVLYYNANRAFQKMDTKKKEEQLKLLKEKY | |
| | | GINTDPPKKRTADGSEFESPKKKRKV | |
| 520 | Nt- | MKRTADGSEFESPKKKRKVMSDFDEFERQLNENKQERD | 2352 |
| | U2AF2- | KENRHRKRSHSRSRSRDRKRRSRSRDRRNRDQRSASRD | |
| | Ct- | RRRRSKPLTRGAKEEHGGLIRSPRHEKKKKVRKYWDVP | |
| | U2AF1 | PPGFEHITPMQYKAMQAAGQIPATALLPTMTPDGLAVT | |
| | | PTPVPVVGSQMTRQARRLYVGNIPFGITEEAMMDFFNA | |
| | | QMRLGGLTQAPGNPVLAVQINQDKNFAFLEFRSVDETT | |
| | | QAMAFDGIIFQGQSLKIRRPHDYQPLPGMSENPSVYVP | |
| | | GVVSTVVPDSAHKLFIGGLPNYLNDDQVKELLTSFGPL | |
| | | KAFNLVKDSATGLSKGYAFCEYVDINVTDQAIAGLNGM | |
| | | QLGDKKLLVQRASVGAKNATLVSPPSTINQTPVTLQVP | |
| | | GLMSSQVQMGGHPTEVLCLMNMVLPEELLDDEEYEEIV | |
| | | EDVRDECSKYGLVKSIEIPRPVDGVEVPGCGKIFVEFT | |
| | | SVFDCQKAMQGLTGRKFANRVVVTKYCDPDSYHRRDFW | |
| | | TTTMKISIEFLEPFRMTKWQESTRRNKNNKEFVRGQAF | |
| | | ARWHRNKKDNTKGRPYITGTLLRSAVIRSAENLLTLSD | |
| | | GKISEKTCCPGKFDTEDKDRLLQLRQRSTLRWTDKNPC | |
| | | PDNAETYCPFCELLGRSGNDGKKAEKKDWRFRIHFGNL | |
| | | SLPGKPDFDGPKAIGSQRVLNRVDFKSGKAHDFFKAYE | |
| | | VDHTRFPRFEGEITIDNKVSAEARKLLCDSLKFTDRLC | |
| | | GALCVIRFDEYTPAADSGKQTENVQAEPNANLAEKTAE | |
| | | QIISILDDNKKTEYTRLLADAIRSLRRSSKLVAGLPKD | |
| | | HDGKDDHYLWDIGKKKKDENSVTIRQILTTSADTKELK | |
| | | NAGKWREFCEKLGEALYLKSKDMSGGLKITRRILGDAE | |
| | | FHGKPDRLEKSRSVSIGSVLKETVVCGELVAKTPFFFG | |
| | | AIDEDAKQTDLQVLLTPDNKYRLPRSAVRGILRRDLQT | |
| | | YFDSPCNAELGGRPCMCKTCRIMRGITVMDARSEYNAP | |
| | | PEIRHRTRINPFTGTVAEGALFNMEVAPEGIVFPFQLR | |
| | | YRGSEDGLPDALKTVLKWWAEGQAFMSGAASTGKGRFR | |
| | | MENAKYETLDLSDENQRNDYLKNWGWRDEKGLEELKKR | |
| | | LNSGLPEPGNYRDPKWHEINVSIEMASPFINGDPIRAA | |
| | | VDKRGTDVVTFVKYKAEGEEAKPVCAYKAESFRGVIRS | |
| | | AVARIHMEDGVPLTELTHSDCECLLCQIFGSEYEAGKI | |
| | | RFEDLVFESDPEPVTFDHVAIDRFTGGAADKKKEDDSP | |
| | | LPGSPARPLMLKGSFWIRRDVLEDEEYCKALGKALADV | |
| | | NNGLYPLGGKSAIGYGQVKSLGIKGDDKRISRLMNPAF | |
| | | DETDVAVPEKPKTDAEVRIEAEKVYYPHYFVEPHKKVE | |
| | | REEKPCGHQKFHEGRLTGKIRCKLITKTPLIVPDTSND | |
| | | DFFRPADKEARKEKDEYHKSYAFFRLHKQIMIPGSELR | |
| | | GMVSSVYETVTNSCFRIFDETKRLSWRMDADHQNVLQD | |
| | | FLPGRVTADGKHIQKFSETARVPFYDKTQKHFDILDEQ | |
| | | EIAGEKPVRMWVKRFIKRLSLVDPAKHPQKKQDNKWKR | |
| | | RKEGIATFIEQKNGSYYFNVVTNNGCTSFHLWHKPDNF | |
| | | DQEKLEGIQNGEKLDCWVRDSRYQKAFQEIPENDPDGW | |
| | | ECKEGYLHVVGPSKVEFSDKKGDVINNFQGTLPSVPND | |
| | | WKTIRTNDFKNRKRKNEPVFCCEDDKGNYYTMAKYCET | |
| | | FFFDLKENEEYEIPEKARIKYKELLRVYNNNPQAVPES | |
| | | VFQSRVARENVEKLKSGDLVYFKHNEKYVEDIVPVRIS | |
| | | RTVDDRMIGKRMSADLRPCHGDWVEDGDLSALNAYPEK | |
| | | RLLLRHPKGLCPACRLFGTGSYKGRVRFGFASLENDPE | |
| | | WLIPGKNPGDPFHGGPVMLSLLERPRPTWSIPGSDNKF | |
| | | KVPGRKFYVHHHAWKTIKDGNHPTTGKAIEQSPNNRTV | |
| | | EALAGGNSFSFEIAFENLKEWELGLLIHSLQLEKGLAH | |
| | | KLGMAKSMGFGSVEIDVESVRLRKDWKQWRNGNSEIPN | |
| | | WLGKGFAKLKEWFRDELDFIENLKKLLWFPEGDQAPRV | |
| | | CYPMLRKKDDPNGNSGYEELKDGEFKKEDRQKKLTTPW | |
| | | TPWAMAEYLASIFGTEKDKVNCSFYFKIGACRHGDRCS | |
| | | RLHNKPTFSQTIALLNIYRNPQNSSQSADGLRCAVSDV | |
| | | EMQEHYDEFFEEVFTEMEEKYGEVEEMNVCDNLGDHLV | |
| | | GNVYVKFRREEDAEKAVIDLNNRWFNGQPLHAELSPVT | |
| | | DFREACCRQYEMGECTRGGFCNFMHLKPISRELRRELY | |
| | | GRRRKKHRSRSRSRERRSRSRDRGRGGGGGGGGGGGGR | |
| | | ERDRRRSRDRERSGRFKRTADGSEFESPKKKRKV | |
| 521 | PDF0954_ | MKRTADGSEFESPKKKRKVTTTMKISIEFLEPFRMTKW | 1326 |
| | Cas711S- | QESTRRNKNNKEFVRGQAFARWHRNKKDNTKGRPYITG | |
| | E279R- | TLLRSAVIRSAENLLTLSDGKISEKTCCPGKFDTEDKD | |
| | D1580R- | RLLQLRQRSTLRWTDKNPCPDNAETYCPFCELLGRSGN | |
| | point- | DGKKAEKKDWRFRIHFGNLSLPGKPDFDGPKAIGSQRV | |
| | mutationR174G | LNRVDFKSGKAHDFFKAYEVDHTRFPRFEGEITIDNKV | |
| | | SAEARKLLCDSLKFTDRLCGALCVIRFDEYTPAADSGK | |
| | | QTENVQAEPNANLAEKTAEQIISILDDNKKTRYTRLLA | |
| | | DAIRSLRRSSKLVAGLPKDHDGKDDHYLWDIGKKKKDE | |
| | | NSVTIRQILTTSADTKELKNAGKWREFCEKLGEALYLK | |
| | | SKDMSGGLKITRRILGDAEFHGKPDRLEKSRSVSIGSV | |
| | | LKETVVCGELVAKTPFFFGAIDEDAKQTDLQVLLTPDN | |
| | | KYRLPRSAVRGILRRDLQTYFDSPCNAELGGRPCMCKT | |
| | | CRIMRGITVMDARSEYNAPPEIRHRTRINPFTGTVAEG | |
| | | ALFNMEVAPEGIVEPFQLRYRGSEDGLPDALKTVLKWW | |
| | | AEGQAFMSGAASTGKGRFRMENAKYETLDLSDENQRND | |
| | | YLKNWGWRDEKGLEELKKRLNSGLPEPGNYRDPKWHEI | |
| | | NVSIEMASPFINGDPIRAAVDKRGTDVVTFVKYKAEGE | |
| | | EAKPVCAYKAESFRGVIRSAVARIHMEDGVPLTELTHS | |
| | | DCECLLCQIFGSEYEAGKIRFEDLVFESDPEPVTFDHV | |
| | | AIDRFTGGAADKKKFDDSPLPGSPARPLMLKGSFWIRR | |
| | | DVLEDEEYCKALGKALADVNNGLYPLGGKSAIGYGQVK | |
| | | SLGIKGDDKRISRLMNPAFDETDVAVPEKPKTDAEVRI | |
| | | EAEKVYYPHYFVEPHKKVEREEKPCGHQKFHEGRLTGK | |
| | | IRCKLITKTPLIVPDTSNDDFFRPADKEARKEKDEYHK | |
| | | SYAFFRLHKQIMIPGSELRGMVSSVYETVTNSCFRIFD | |
| | | ETKRLSWRGGGSRTVDDRMIGKRMSADLRPCHGDWVED | |
| | | GDLSALNAYPEKRLLLRHPKGLCPACRLFGTGSYKGRV | |
| | | RFGFASLENDPEWLIPGKNPGDPFHGGPVMLSLLERPR | |
| | | PTWSIPGSDNKFKVPGRKFYVHHHAWKTIKDGNHPTTG | |
| | | KAIEQSPNNRTVEALAGGNSESFEIAFENLKEWELGLL | |
| | | IHSLQLEKGLAHKLGMAKSMGFGSVEIDVESVRLRKDW | |
| | | KQWRNGNSEIPNWLGKGFAKLKEWFRDELDFIENLKKL | |
| | | LWFPEGDQAPRVCYPMLRKKDDPNGNSGYEELKRGEFK | |
| | | KEDRQKKLTTPWTPWAKRTADGSEFESPKKKRKV | |
| 522 | pDF0952_ | MKRTADGSEFESPKKKRKVTTTMKISIEFLEPFRMTKW | 1727 |
| | RBM17 | QESTRRNKNNKEFVRGQAFARWHRNKKDNTKGRPYITG | |
| | | TLLRSAVIRSAENLLTLSDGKISEKTCCPGKFDTEDKD | |
| | | RLLQLRQRSTLRWTDKNPCPDNAETYCPFCELLGRSGN | |
| | | DGKKAEKKDWRFRIHFGNLSLPGKPDFDGPKAIGSQRV | |
| | | LNRVDFKSGKAHDFFKAYEVDHTRFPRFEGEITIDNKV | |
| | | SAEARKLLCDSLKFTDRLCGALCVIRFDEYTPAADSGK | |
| | | QTENVQAEPNANLAEKTAEQIISILDDNKKTEYTRLLA | |
| | | DAIRSLRRSSKLVAGLPKDHDGKDDHYLWDIGKKKKDE | |
| | | NSVTIRQILTTSADTKELKNAGKWREFCEKLGEALYLK | |
| | | SKDMSGGLKITRRILGDAEFHGKPDRLEKSRSVSIGSV | |
| | | LKETVVCGELVAKTPFFFGAIDEDAKQTDLQVLLTPDN | |
| | | KYRLPRSAVRGILRRDLQTYFDSPCNAELGGRPCMCKT | |
| | | CRIMRGITVMDARSEYNAPPEIRHRTRINPFTGTVAEG | |
| | | ALFNMEVAPEGIVFPFQLRYRGSEDGLPDALKTVLKWW | |
| | | AEGQAFMSGAASTGKGRFRMENAKYETLDLSDENQRND | |
| | | YLKNWGWRDEKGLEELKKRLNSGLPEPGNYRDPKWHEI | |
| | | NVSIEMASPFINGDPIRAAVDKRGTDVVTFVKYKAEGE | |
| | | EAKPVCAYKAESFRGVIRSAVARIHMEDGVPLTELTHS | |
| | | DCECLLCQIFGSEYEAGKIRFEDLVFESDPEPVTFDHV | |
| | | AIDRFTGGAADKKKFDDSPLPGSPARPLMLKGSFWIRR | |
| | | DVLEDEEYCKALGKALADVNNGLYPLGGKSAIGYGQVK | |
| | | SLGIKGDDKRISRLMNPAFDETDVAVPEKPKTDAEVRI | |
| | | EAEKVYYPHYFVEPHKKVEREEKPCGHQKFHEGRLTGK | |
| | | IRCKLITKTPLIVPDTSNDDFFRPADKEARKEKDEYHK | |
| | | SYAFFRLHKQIMIPGSELRGMVSSVYETVTNSCFRIFD | |
| | | ETKRLSWRGGGSRTVDDRMIGKRMSADLRPCHGDWVED | |
| | | GDLSALNAYPEKRLLLRHPKGLCPACRLFGTGSYKGRV | |
| | | RFGFASLENDPEWLIPGKNPGDPFHGGPVMLSLLERPR | |
| | | PTWSIPGSDNKFKVPGRKFYVHHHAWKTIKDGNHPTTG | |
| | | KAIEQSPNNRTVEALAGGNSFSFEIAFENLKEWELGLL | |
| | | IHSLQLEKGLAHKLGMAKSMGFGSVEIDVESVRLRKDW | |
| | | KQWRNGNSEIPNWLGKGFAKLKEWFRDELDFIENLKKL | |
| | | LWFPEGDQAPRVCYPMLRKKDDPNGNSGYEELKDGEFK | |
| | | KEDRQKKLTTPWTPWAMSLYDDLGVETSDSKTEGWSKN | |
| | | FKLLQSQLQVKKAALTQAKSQRTKQSTVLAPVIDLKRG | |
| | | GSSDDRQIVDTPPHVAAGLKDPVPSGESAGEVLIPLAD | |
| | | EYDPMFPNDYEKVVKRQREERQRQRELERQKEIEEREK | |
| | | RRKDRHEASGFARRPDPDSDEDEDYERERRKRSMGGAA | |
| | | IAPPTSLVEKDKELPRDFPYEEDSRPRSQSSKAAIPPP | |
| | | VYEEQDRPRSPTGPSNSFLANMGGTVAHKIMQKYGFRE | |
| | | GQGLGKHEQGLSTALSVEKTSKRGGKIIVGDATEKDAS | |
| | | KKSDSNPLTEILKCPTKVVLLRNMVGAGEVDEDLEVET | |
| | | KEECEKYGKVGKCVIFEIPGAPDDEAVRIFLEFERVES | |
| | | AIKAVVDLNGRYFGGRVVKACFYNLDKFRVLDLAEQVK | |
| | | RTADGSEFESPKKKRKV | |
| 523 | pDF0952_ | MKRTADGSEFESPKKKRKVTTTMKISIEFLEPFRMTKW | 1451 |
| | SF3B6 | QESTRRNKNNKEFVRGQAFARWHRNKKDNTKGRPYITG | |
| | | TLLRSAVIRSAENLLTLSDGKISEKTCCPGKFDTEDKD | |
| | | RLLQLRQRSTLRWTDKNPCPDNAETYCPFCELLGRSGN | |
| | | DGKKAEKKDWRFRIHFGNLSLPGKPDFDGPKAIGSQRV | |
| | | LNRVDFKSGKAHDFFKAYEVDHTRFPRFEGEITIDNKV | |
| | | SAEARKLLCDSLKFTDRLCGALCVIRFDEYTPAADSGK | |
| | | QTENVQAEPNANLAEKTAEQIISILDDNKKTEYTRLLA | |
| | | DAIRSLRRSSKLVAGLPKDHDGKDDHYLWDIGKKKKDE | |
| | | NSVTIRQILTTSADTKELKNAGKWREFCEKLGEALYLK | |
| | | SKDMSGGLKITRRILGDAEFHGKPDRLEKSRSVSIGSV | |
| | | LKETVVCGELVAKTPFFFGAIDEDAKQTDLQVLLTPDN | |
| | | KYRLPRSAVRGILRRDLQTYFDSPCNAELGGRPCMCKT | |
| | | CRIMRGITVMDARSEYNAPPEIRHRTRINPFTGTVAEG | |
| | | ALFNMEVAPEGIVFPFQLRYRGSEDGLPDALKTVLKWW | |
| | | AEGQAFMSGAASTGKGRFRMENAKYETLDLSDENQRND | |
| | | YLKNWGWRDEKGLEELKKRLNSGLPEPGNYRDPKWHEI | |
| | | NVSIEMASPFINGDPIRAAVDKRGTDVVTFVKYKAEGE | |
| | | EAKPVCAYKAESFRGVIRSAVARIHMEDGVPLTELTHS | |
| | | DCECLLCQIFGSEYEAGKIRFEDLVFESDPEPVTFDHV | |
| | | AIDRFTGGAADKKKFDDSPLPGSPARPLMLKGSFWIRR | |
| | | DVLEDEEYCKALGKALADVNNGLYPLGGKSAIGYGQVK | |
| | | SLGIKGDDKRISRLMNPAFDETDVAVPEKPKTDAEVRI | |
| | | EAEKVYYPHYFVEPHKKVEREEKPCGHQKFHEGRLTGK | |
| | | IRCKLITKTPLIVPDTSNDDFFRPADKEARKEKDEYHK | |
| | | SYAFFRLHKQIMIPGSELRGMVSSVYETVTNSCFRIFD | |
| | | ETKRLSWRGGGSRTVDDRMIGKRMSADLRPCHGDWVED | |
| | | GDLSALNAYPEKRLLLRHPKGLCPACRLFGTGSYKGRV | |
| | | RFGFASLENDPEWLIPGKNPGDPFHGGPVMLSLLERPR | |
| | | PTWSIPGSDNKFKVPGRKFYVHHHAWKTIKDGNHPTTG | |
| | | KAIEQSPNNRTVEALAGGNSFSFEIAFENLKEWELGLL | |
| | | IHSLQLEKGLAHKLGMAKSMGFGSVEIDVESVRLRKDW | |
| | | KQWRNGNSEIPNWLGKGFAKLKEWFRDELDFIENLKKL | |
| | | LWFPEGDQAPRVCYPMLRKKDDPNGNSGYEELKDGEFK | |
| | | KEDRQKKLTTPWTPWAMAMQAAKRANIRLPPEVNRILY | |
| | | IRNLPYKITAEEMYDIFGKYGPIRQIRVGNTPETRGTA | |
| | | YVVYEDIFDAKNACDHLSGFNVCNRYLVVLYYNANRAF | |
| | | QKMDTKKKEEQLKLLKEKYGINTDPPKKRTADGSEFES | |
| | | PKKKRKV | |
| 524 | pDF0952_ | MKRTADGSEFESPKKKRKVTTTMKISIEFLEPFRMTKW | 1566 |
| | U2AF1 | QESTRRNKNNKEFVRGQAFARWHRNKKDNTKGRPYITG | |
| | | TLLRSAVIRSAENLLTLSDGKISEKTCCPGKFDTEDKD | |
| | | RLLQLRQRSTLRWTDKNPCPDNAETYCPFCELLGRSGN | |
| | | DGKKAEKKDWRFRIHFGNLSLPGKPDFDGPKAIGSQRV | |
| | | LNRVDFKSGKAHDFFKAYEVDHTRFPRFEGEITIDNKV | |
| | | SAEARKLLCDSLKFTDRLCGALCVIRFDEYTPAADSGK | |
| | | QTENVQAEPNANLAEKTAEQIISILDDNKKTEYTRLLA | |
| | | DAIRSLRRSSKLVAGLPKDHDGKDDHYLWDIGKKKKDE | |
| | | NSVTIRQILTTSADTKELKNAGKWREFCEKLGEALYLK | |
| | | SKDMSGGLKITRRILGDAEFHGKPDRLEKSRSVSIGSV | |
| | | LKETVVCGELVAKTPFFFGAIDEDAKQTDLQVLLTPDN | |
| | | KYRLPRSAVRGILRRDLQTYFDSPCNAELGGRPCMCKT | |
| | | CRIMRGITVMDARSEYNAPPEIRHRTRINPFTGTVAEG | |
| | | ALFNMEVAPEGIVFPFQLRYRGSEDGLPDALKTVLKWW | |
| | | AEGQAFMSGAASTGKGRFRMENAKYETLDLSDENQRND | |
| | | YLKNWGWRDEKGLEELKKRLNSGLPEPGNYRDPKWHEI | |
| | | NVSIEMASPFINGDPIRAAVDKRGTDVVTFVKYKAEGE | |
| | | EAKPVCAYKAESFRGVIRSAVARIHMEDGVPLTELTHS | |
| | | DCECLLCQIFGSEYEAGKIRFEDLVFESDPEPVTFDHV | |
| | | AIDRFTGGAADKKKFDDSPLPGSPARPLMLKGSFWIRR | |
| | | DVLEDEEYCKALGKALADVNNGLYPLGGKSAIGYGQVK | |
| | | SLGIKGDDKRISRLMNPAFDETDVAVPEKPKTDAEVRI | |
| | | EAEKVYYPHYFVEPHKKVEREEKPCGHQKFHEGRLTGK | |
| | | IRCKLITKTPLIVPDTSNDDFFRPADKEARKEKDEYHK | |
| | | SYAFFRLHKQIMIPGSELRGMVSSVYETVTNSCFRIFD | |
| | | ETKRLSWRGGGSRTVDDRMIGKRMSADLRPCHGDWVED | |
| | | GDLSALNAYPEKRLLLRHPKGLCPACRLFGTGSYKGRV | |
| | | RFGFASLENDPEWLIPGKNPGDPFHGGPVMLSLLERPR | |
| | | PTWSIPGSDNKFKVPGRKFYVHHHAWKTIKDGNHPTTG | |
| | | KAIEQSPNNRTVEALAGGNSFSFEIAFENLKEWELGLL | |
| | | IHSLQLEKGLAHKLGMAKSMGFGSVEIDVESVRLRKDW | |
| | | KQWRNGNSEIPNWLGKGFAKLKEWFRDELDFIENLKKL | |
| | | LWFPEGDQAPRVCYPMLRKKDDPNGNSGYEELKDGEFK | |
| | | KEDRQKKLTTPWTPWAMAEYLASIFGTEKDKVNCSFYF | |
| | | KIGACRHGDRCSRLHNKPTFSQTIALLNIYRNPQNSSQ | |
| | | SADGLRCAVSDVEMQEHYDEFFEEVFTEMEEKYGEVEE | |
| | | MNVCDNLGDHLVGNVYVKFRREEDAEKAVIDLNNRWFN | |
| | | GQPIHAELSPVTDFREACCRQYEMGECTRGGFCNFMHL | |
| | | KPISRELRRELYGRRRKKHRSRSRSRERRSRSRDRGRG | |
| | | GGGGGGGGGGGRERDRRRSRDRERSGRFKRTADGSEFE | |
| | | SPKKKRKV | |
| 525 | pDF0952_ | MKRTADGSEFESPKKKRKVTTTMKISIEFLEPFRMTKW | 1801 |
| | U2AF2 | QESTRRNKNNKEFVRGQAFARWHRNKKDNTKGRPYITG | |
| | | TLLRSAVIRSAENLLTLSDGKISEKTCCPGKFDTEDKD | |
| | | RLLQLRQRSTLRWTDKNPCPDNAETYCPFCELLGRSGN | |
| | | DGKKAEKKDWRFRIHFGNLSLPGKPDFDGPKAIGSQRV | |
| | | LNRVDFKSGKAHDFFKAYEVDHTRFPRFEGEITIDNKV | |
| | | SAEARKLLCDSLKFTDRLCGALCVIRFDEYTPAADSGK | |
| | | QTENVQAEPNANLAEKTAEQIISILDDNKKTEYTRLLA | |
| | | DAIRSLRRSSKLVAGLPKDHDGKDDHYLWDIGKKKKDE | |
| | | NSVTIRQILTTSADTKELKNAGKWREFCEKLGEALYLK | |
| | | SKDMSGGLKITRRILGDAEFHGKPDRLEKSRSVSIGSV | |
| | | LKETVVCGELVAKTPFFFGAIDEDAKQTDLQVLLTPDN | |
| | | KYRLPRSAVRGILRRDLQTYFDSPCNAELGGRPCMCKT | |
| | | CRIMRGITVMDARSEYNAPPEIRHRTRINPFTGTVAEG | |
| | | ALFNMEVAPEGIVFPFQLRYRGSEDGLPDALKTVLKWW | |
| | | AEGQAFMSGAASTGKGRFRMENAKYETLDLSDENQRND | |
| | | YLKNWGWRDEKGLEELKKRLNSGLPEPGNYRDPKWHEI | |
| | | NVSIEMASPFINGDPIRAAVDKRGTDVVTFVKYKAEGE | |
| | | EAKPVCAYKAESFRGVIRSAVARIHMEDGVPLTELTHS | |
| | | DCECLLCQIFGSEYEAGKIRFEDLVFESDPEPVTFDHV | |
| | | AIDRFTGGAADKKKFDDSPLPGSPARPLMLKGSFWIRR | |
| | | DVLEDEEYCKALGKALADVNNGLYPLGGKSAIGYGQVK | |
| | | SLGIKGDDKRISRLMNPAFDETDVAVPEKPKTDAEVRI | |
| | | EAEKVYYPHYFVEPHKKVEREEKPCGHQKFHEGRLTGK | |
| | | IRCKLITKTPLIVPDTSNDDFFRPADKEARKEKDEYHK | |
| | | SYAFFRLHKQIMIPGSELRGMVSSVYETVTNSCFRIFD | |
| | | ETKRLSWRGGGSRTVDDRMIGKRMSADLRPCHGDWVED | |
| | | GDLSALNAYPEKRLLLRHPKGLCPACRLFGTGSYKGRV | |
| | | RFGFASLENDPEWLIPGKNPGDPFHGGPVMLSLLERPR | |
| | | PTWSIPGSDNKFKVPGRKFYVHHHAWKTIKDGNHPTTG | |
| | | KAIEQSPNNRTVEALAGGNSFSFEIAFENLKEWELGLL | |
| | | IHSLQLEKGLAHKLGMAKSMGFGSVEIDVESVRLRKDW | |
| | | KQWRNGNSEIPNWLGKGFAKLKEWERDELDFIENLKKL | |
| | | LWFPEGDQAPRVCYPMLRKKDDPNGNSGYEELKDGEFK | |
| | | KEDRQKKLTTPWTPWAMSDFDEFERQLNENKQERDKEN | |
| | | RHRKRSHSRSRSRDRKRRSRSRDRRNRDQRSASRDRRR | |
| | | RSKPLTRGAKEEHGGLIRSPRHEKKKKVRKYWDVPPPG | |
| | | FEHITPMQYKAMQAAGQIPATALLPTMTPDGLAVTPTP | |
| | | VPVVGSQMTRQARRLYVGNIPFGITEEAMMDFFNAQMR | |
| | | LGGLTQAPGNPVLAVQINQDKNFAFLEFRSVDETTQAM | |
| | | AFDGIIFQGQSLKIRRPHDYQPLPGMSENPSVYVPGVV | |
| | | STVVPDSAHKLFIGGLPNYLNDDQVKELLTSFGPLKAF | |
| | | NLVKDSATGLSKGYAFCEYVDINVTDQAIAGINGMQLG | |
| | | DKKLLVQRASVGAKNATLVSPPSTINQTPVTLQVPGLM | |
| | | SSQVQMGGHPTEVLCLMNMVLPEELLDDEEYEEIVEDV | |
| | | RDECSKYGLVKSIEIPRPVDGVEVPGCGKIFVEFTSVF | |
| | | DCQKAMQGLTGRKFANRVVVTKYCDPDSYHRRDFWKRT | |
| | | ADGSEFESPKKKRKV | |
| 526 | pDF0953_ | MKRTADGSEFESPKKKRKVTTTMKISIEFLEPFRMTKW | 1727 |
| | RBM17 | QESTRRNKNNKEFVRGQAFARWHRNKKDNTKGRPYITG | |
| | | TLLRSAVIRSAENLLTLSDGKISEKTCCPGKFDTEDKD | |
| | | RLLQLRQRSTLRWTDKNPCPDNAETYCPFCELLGRSGN | |
| | | DGKKAEKKDWRFRIHFGNLSLPGKPDFDGPKAIGSQRV | |
| | | LNRVDFKSGKAHDFFKAYEVDHTRFPRFEGEITIDNKV | |
| | | SAEARKLLCDSLKFTDRLCGALCVIRFDEYTPAADSGK | |
| | | QTENVQAEPNANLAEKTAEQIISILDDNKKTEKTRLLA | |
| | | DAIRSLRRSSKLVAGLPKDHDGKDDHYLWDIGKKKKDE | |
| | | NSVTIRQILTTSADTKELKNAGKWREFCEKLGEALYLK | |
| | | SKDMSGGLKITRRILGDAEFHGKPDRLEKSRSVSIGSV | |
| | | LKETVVCGELVAKTPFFFGAIDEDAKQTDLQVLLTPDN | |
| | | KYRLPRSAVRGILRRDLQTYFDSPCNAELGGRPCMCKT | |
| | | CRIMRGITVMDARSEYNAPPEIRHRTRINPFTGTVAEG | |
| | | ALFNMEVAPEGIVFPFQLRYRGSEDGLPDALKTVLKWW | |
| | | AEGQAFMSGAASTGKGRFRMENAKYETLDLSDENQRND | |
| | | YLKNWGWRDEKGLEELKKRLNSGLPEPGNYRDPKWHEI | |
| | | NVSIEMASPFINGDPIRAAVDKRGTDVVTFVKYKAEGE | |
| | | EAKPVCAYKAESFRGVIRSAVARIHMEDGVPLTELTHS | |
| | | DCECLLCQIFGSEYEAGKIRFEDLVFESDPEPVTFDHV | |
| | | AIDRFTGGAADKKKFDDSPLPGSPARPLMLKGSFWIRR | |
| | | DVLEDEEYCKALGKALADVNNGLYPLGGKSAIGYGQVK | |
| | | SLGIKGDDKRISRLMNPAFDETDVAVPEKPKTDAEVRI | |
| | | EAEKVYYPHYFVEPHKKVEREEKPCGHQKFHEGRLTGK | |
| | | IRCKLITKTPLIVPDTSNDDFFRPADKEARKEKDEYHK | |
| | | SYAFFRLHKQIMIPGSELRGMVSSVYETVTNSCFRIFD | |
| | | ETKRLSWRGGGSRTVDDRMIGKRMSADLRPCHGDWVED | |
| | | GDLSALNAYPEKRLLLRHPKGLCPACRLFGTGSYKGRV | |
| | | RFGFASLENDPEWLIPGKNPGDPFHGGPVMLSLLERPR | |
| | | PTWSIPGSDNKFKVPGRKFYVHHHAWKTIKDGNHPTTG | |
| | | KAIEQSPNNRTVEALAGGNSFSFEIAFENLKEWELGLL | |
| | | IHSLQLEKGLAHKLGMAKSMGFGSVEIDVESVRLRKDW | |
| | | KQWRNGNSEIPNWLGKGFAKLKEWFRDELDFIENLKKL | |
| | | LWFPEGDQAPRVCYPMLRKKDDPNGNSGYEELKRGEFK | |
| | | KEDRQKKLTTPWTPWAMSLYDDLGVETSDSKTEGWSKN | |
| | | FKLLQSQLQVKKAALTQAKSQRTKQSTVLAPVIDLKRG | |
| | | GSSDDRQIVDTPPHVAAGLKDPVPSGFSAGEVLIPLAD | |
| | | EYDPMFPNDYEKVVKRQREERQRQRELERQKEIEEREK | |
| | | RRKDRHEASGFARRPDPDSDEDEDYERERRKRSMGGAA | |
| | | IAPPTSLVEKDKELPRDFPYEEDSRPRSQSSKAAIPPP | |
| | | VYEEQDRPRSPTGPSNSFLANMGGTVAHKIMQKYGFRE | |
| | | GQGLGKHEQGLSTALSVEKTSKRGGKIIVGDATEKDAS | |
| | | KKSDSNPLTEILKCPTKVVLLRNMVGAGEVDEDLEVET | |
| | | KEECEKYGKVGKCVIFEIPGAPDDEAVRIFLEFERVES | |
| | | AIKAVVDLNGRYFGGRVVKACFYNLDKFRVLDLAEQVK | |
| | | RTADGSEFESPKKKRKV | |
| 527 | pDF0953_ | MKRTADGSEFESPKKKRKVTTTMKISIEFLEPFRMTKW | 1451 |
| | SF3B6 | QESTRRNKNNKEFVRGQAFARWHRNKKDNTKGRPYITG | |
| | | TLLRSAVIRSAENLLTLSDGKISEKTCCPGKFDTEDKD | |
| | | RLLQLRQRSTLRWTDKNPCPDNAETYCPFCELLGRSGN | |
| | | DGKKAEKKDWRFRIHFGNLSLPGKPDFDGPKAIGSQRV | |
| | | LNRVDFKSGKAHDFFKAYEVDHTRFPRFEGEITIDNKV | |
| | | SAEARKLLCDSLKFTDRLCGALCVIRFDEYTPAADSGK | |
| | | QTENVQAEPNANLAEKTAEQIISILDDNKKTEKTRLLA | |
| | | DAIRSLRRSSKLVAGLPKDHDGKDDHYLWDIGKKKKDE | |
| | | NSVTIRQILTTSADTKELKNAGKWREFCEKLGEALYLK | |
| | | SKDMSGGLKITRRILGDAEFHGKPDRLEKSRSVSIGSV | |
| | | LKETVVCGELVAKTPFFFGAIDEDAKQTDLQVLLTPDN | |
| | | KYRLPRSAVRGILRRDLQTYFDSPCNAELGGRPCMCKT | |
| | | CRIMRGITVMDARSEYNAPPEIRHRTRINPFTGTVAEG | |
| | | ALFNMEVAPEGIVFPFQLRYRGSEDGLPDALKTVLKWW | |
| | | AEGQAFMSGAASTGKGRFRMENAKYETLDLSDENQRND | |
| | | YLKNWGWRDEKGLEELKKRLNSGLPEPGNYRDPKWHEI | |
| | | NVSIEMASPFINGDPIRAAVDKRGTDVVTFVKYKAEGE | |
| | | EAKPVCAYKAESFRGVIRSAVARIHMEDGVPLTELTHS | |
| | | DCECLLCQIFGSEYEAGKIRFEDLVFESDPEPVTFDHV | |
| | | AIDRFTGGAADKKKFDDSPLPGSPARPLMLKGSFWIRR | |
| | | DVLEDEEYCKALGKALADVNNGLYPLGGKSAIGYGQVK | |
| | | SLGIKGDDKRISRLMNPAFDETDVAVPEKPKTDAEVRI | |
| | | EAEKVYYPHYFVEPHKKVEREEKPCGHQKFHEGRLTGK | |
| | | IRCKLITKTPLIVPDTSNDDEFRPADKEARKEKDEYHK | |
| | | SYAFFRLHKQIMIPGSELRGMVSSVYETVTNSCFRIFD | |
| | | ETKRLSWRGGGSRTVDDRMIGKRMSADLRPCHGDWVED | |
| | | GDLSALNAYPEKRLLLRHPKGLCPACRLFGTGSYKGRV | |
| | | RFGFASLENDPEWLIPGKNPGDPFHGGPVMLSLLERPR | |
| | | PTWSIPGSDNKFKVPGRKFYVHHHAWKTIKDGNHPTTG | |
| | | KAIEQSPNNRTVEALAGGNSFSFEIAFENLKEWELGLL | |
| | | IHSLQLEKGLAHKLGMAKSMGFGSVEIDVESVRLRKDW | |
| | | KQWRNGNSEIPNWLGKGFAKLKEWFRDELDFIENLKKL | |
| | | LWFPEGDQAPRVCYPMLRKKDDPNGNSGYEELKRGEFK | |
| | | KEDRQKKLTTPWTPWAMAMQAAKRANIRLPPEVNRILY | |
| | | IRNLPYKITAEEMYDIFGKYGPIRQIRVGNTPETRGTA | |
| | | YVVYEDIFDAKNACDHLSGFNVCNRYLVVLYYNANRAF | |
| | | QKMDTKKKEEQLKLLKEKYGINTDPPKKRTADGSEFES | |
| | | PKKKRKV | |
| 528 | pDF0953_ | MKRTADGSEFESPKKKRKVTTTMKISIEFLEPFRMTKW | 1566 |
| | U2AF1 | QESTRRNKNNKEFVRGQAFARWHRNKKDNTKGRPYITG | |
| | | TLLRSAVIRSAENLLTLSDGKISEKTCCPGKFDTEDKD | |
| | | RLLQLRQRSTLRWTDKNPCPDNAETYCPFCELLGRSGN | |
| | | DGKKAEKKDWRFRIHFGNLSLPGKPDFDGPKAIGSQRV | |
| | | LNRVDFKSGKAHDFFKAYEVDHTRFPRFEGEITIDNKV | |
| | | SAEARKLLCDSLKFTDRLCGALCVIRFDEYTPAADSGK | |
| | | QTENVQAEPNANLAEKTAEQIISILDDNKKTEKTRLLA | |
| | | DAIRSLRRSSKLVAGLPKDHDGKDDHYLWDIGKKKKDE | |
| | | NSVTIRQILTTSADTKELKNAGKWREFCEKLGEALYLK | |
| | | SKDMSGGLKITRRILGDAEFHGKPDRLEKSRSVSIGSV | |
| | | LKETVVCGELVAKTPFFFGAIDEDAKQTDLQVLLTPDN | |
| | | KYRLPRSAVRGILRRDLQTYFDSPCNAELGGRPCMCKT | |
| | | CRIMRGITVMDARSEYNAPPEIRHRTRINPFTGTVAEG | |
| | | ALFNMEVAPEGIVEPFQLRYRGSEDGLPDALKTVLKWW | |
| | | AEGQAFMSGAASTGKGRFRMENAKYETLDLSDENQRND | |
| | | YLKNWGWRDEKGLEELKKRLNSGLPEPGNYRDPKWHEI | |
| | | NVSIEMASPFINGDPIRAAVDKRGTDVVTFVKYKAEGE | |
| | | EAKPVCAYKAESFRGVIRSAVARIHMEDGVPLTELTHS | |
| | | DCECLLCQIFGSEYEAGKIRFEDLVFESDPEPVTFDHV | |
| | | AIDRFTGGAADKKKFDDSPLPGSPARPLMLKGSFWIRR | |
| | | DVLEDEEYCKALGKALADVNNGLYPLGGKSAIGYGQVK | |
| | | SLGIKGDDKRISRLMNPAFDETDVAVPEKPKTDAEVRI | |
| | | EAEKVYYPHYFVEPHKKVEREEKPCGHQKFHEGRLTGK | |
| | | IRCKLITKTPLIVPDTSNDDFFRPADKEARKEKDEYHK | |
| | | SYAFFRLHKQIMIPGSELRGMVSSVYETVTNSCFRIFD | |
| | | ETKRLSWRGGGSRTVDDRMIGKRMSADLRPCHGDWVED | |
| | | GDLSALNAYPEKRLLLRHPKGLCPACRLFGTGSYKGRV | |
| | | RFGFASLENDPEWLIPGKNPGDPFHGGPVMLSLLERPR | |
| | | PTWSIPGSDNKFKVPGRKFYVHHHAWKTIKDGNHPTTG | |
| | | KAIEQSPNNRTVEALAGGNSFSFEIAFENLKEWELGLL | |
| | | IHSLQLEKGLAHKLGMAKSMGFGSVEIDVESVRLRKDW | |
| | | KQWRNGNSEIPNWLGKGFAKLKEWFRDELDFIENLKKL | |
| | | LWFPEGDQAPRVCYPMLRKKDDPNGNSGYEELKRGEFK | |
| | | KEDRQKKLTTPWTPWAMAEYLASIFGTEKDKVNCSFYF | |
| | | KIGACRHGDRCSRLHNKPTFSQTIALLNIYRNPQNSSQ | |
| | | SADGLRCAVSDVEMQEHYDEFFEEVFTEMEEKYGEVEE | |
| | | MNVCDNLGDHLVGNVYVKFRREEDAEKAVIDLNNRWFN | |
| | | GQPIHAELSPVTDFREACCRQYEMGECTRGGFCNFMHL | |
| | | KPISRELRRELYGRRRKKHRSRSRSRERRSRSRDRGRG | |
| | | GGGGGGGGGGGRERDRRRSRDRERSGRFKRTADGSEFE | |
| | | SPKKKRKV | |
| 529 | pDF0953_ | MKRTADGSEFESPKKKRKVTTTMKISIEFLEPFRMTKW | 1801 |
| | U2AF2 | QESTRRNKNNKEFVRGQAFARWHRNKKDNTKGRPYITG | |
| | | TLLRSAVIRSAENLLTLSDGKISEKTCCPGKFDTEDKD | |
| | | RLLQLRQRSTLRWTDKNPCPDNAETYCPFCELLGRSGN | |
| | | DGKKAEKKDWRFRIHFGNLSLPGKPDFDGPKAIGSQRV | |
| | | LNRVDFKSGKAHDFFKAYEVDHTRFPRFEGEITIDNKV | |
| | | SAEARKLLCDSLKFTDRLCGALCVIRFDEYTPAADSGK | |
| | | QTENVQAEPNANLAEKTAEQIISILDDNKKTEKTRLLA | |
| | | DAIRSLRRSSKLVAGLPKDHDGKDDHYLWDIGKKKKDE | |
| | | NSVTIRQILTTSADTKELKNAGKWREFCEKLGEALYLK | |
| | | SKDMSGGLKITRRILGDAEFHGKPDRLEKSRSVSIGSV | |
| | | LKETVVCGELVAKTPFFFGAIDEDAKQTDLQVLLTPDN | |
| | | KYRLPRSAVRGILRRDLQTYFDSPCNAELGGRPCMCKT | |
| | | CRIMRGITVMDARSEYNAPPEIRHRTRINPFTGTVAEG | |
| | | ALFNMEVAPEGIVFPFQLRYRGSEDGLPDALKTVLKWW | |
| | | AEGQAFMSGAASTGKGRFRMENAKYETLDLSDENQRND | |
| | | YLKNWGWRDEKGLEELKKRLNSGLPEPGNYRDPKWHEI | |
| | | NVSIEMASPFINGDPIRAAVDKRGTDVVTFVKYKAEGE | |
| | | EAKPVCAYKAESFRGVIRSAVARIHMEDGVPLTELTHS | |
| | | DCECLLCQIFGSEYEAGKIRFEDLVFESDPEPVTFDHV | |
| | | AIDRFTGGAADKKKFDDSPLPGSPARPLMLKGSFWIRR | |
| | | DVLEDEEYCKALGKALADVNNGLYPLGGKSAIGYGQVK | |
| | | SLGIKGDDKRISRLMNPAFDETDVAVPEKPKTDAEVRI | |
| | | EAEKVYYPHYFVEPHKKVEREEKPCGHQKFHEGRLTGK | |
| | | IRCKLITKTPLIVPDTSNDDFFRPADKEARKEKDEYHK | |
| | | SYAFFRLHKQIMIPGSELRGMVSSVYETVTNSCFRIFD | |
| | | ETKRLSWRGGGSRTVDDRMIGKRMSADLRPCHGDWVED | |
| | | GDLSALNAYPEKRLLLRHPKGLCPACRLFGTGSYKGRV | |
| | | RFGFASLENDPEWLIPGKNPGDPFHGGPVMLSLLERPR | |
| | | PTWSIPGSDNKFKVPGRKFYVHHHAWKTIKDGNHPTTG | |
| | | KAIEQSPNNRTVEALAGGNSFSFEIAFENLKEWELGLL | |
| | | IHSLQLEKGLAHKLGMAKSMGFGSVEIDVESVRLRKDW | |
| | | KQWRNGNSEIPNWLGKGFAKLKEWFRDELDFIENLKKL | |
| | | LWFPEGDQAPRVCYPMLRKKDDPNGNSGYEELKRGEFK | |
| | | KEDRQKKLTTPWTPWAMSDFDEFERQLNENKQERDKEN | |
| | | RHRKRSHSRSRSRDRKRRSRSRDRRNRDQRSASRDRRR | |
| | | RSKPLTRGAKEEHGGLIRSPRHEKKKKVRKYWDVPPPG | |
| | | FEHITPMQYKAMQAAGQIPATALLPTMTPDGLAVTPTP | |
| | | VPVVGSQMTRQARRLYVGNIPFGITEEAMMDFFNAQMR | |
| | | LGGLTQAPGNPVLAVQINQDKNFAFLEFRSVDETTQAM | |
| | | AFDGIIFQGQSLKIRRPHDYQPLPGMSENPSVYVPGVV | |
| | | STVVPDSAHKLFIGGLPNYLNDDQVKELLTSFGPLKAF | |
| | | NLVKDSATGLSKGYAFCEYVDINVTDQAIAGLNGMQLG | |
| | | DKKLLVQRASVGAKNATLVSPPSTINQTPVTLQVPGLM | |
| | | SSQVQMGGHPTEVLCLMNMVLPEELLDDEEYEEIVEDV | |
| | | RDECSKYGLVKSIEIPRPVDGVEVPGCGKIFVEFTSVF | |
| | | DCQKAMQGLTGRKFANRVVVTKYCDPDSYHRRDFWKRT | |
| | | ADGSEFESPKKKRKV | |
| 530 | pDF0954_ | MKRTADGSEFESPKKKRKVTTTMKISIEFLEPFRMTKW | 1727 |
| | RBM17 | QESTRRNKNNKEFVRGQAFARWHRNKKDNTKGRPYITG | |
| | | TLLRSAVIRSAENLLTLSDGKISEKTCCPGKFDTEDKD | |
| | | RLLQLRQRSTLRWTDKNPCPDNAETYCPFCELLGRSGN | |
| | | DGKKAEKKDWRFRIHFGNLSLPGKPDFDGPKAIGSQRV | |
| | | LNRVDFKSGKAHDFFKAYEVDHTRFPRFEGEITIDNKV | |
| | | SAEARKLLCDSLKFTDRLCGALCVIRFDEYTPAADSGK | |
| | | QTENVQAEPNANLAEKTAEQIISILDDNKKTRYTRLLA | |
| | | DAIRSLRRSSKLVAGLPKDHDGKDDHYLWDIGKKKKDE | |
| | | NSVTIRQILTTSADTKELKNAGKWREFCEKLGEALYLK | |
| | | SKDMSGGLKITRRILGDAEFHGKPDRLEKSRSVSIGSV | |
| | | LKETVVCGELVAKTPFFFGAIDEDAKQTDLQVLLTPDN | |
| | | KYRLPRSAVRGILRRDLQTYFDSPCNAELGGRPCMCKT | |
| | | CRIMRGITVMDARSEYNAPPEIRHRTRINPFTGTVAEG | |
| | | ALFNMEVAPEGIVFPFQLRYRGSEDGLPDALKTVLKWW | |
| | | AEGQAFMSGAASTGKGRFRMENAKYETLDLSDENQRND | |
| | | YLKNWGWRDEKGLEELKKRLNSGLPEPGNYRDPKWHEI | |
| | | NVSIEMASPFINGDPIRAAVDKRGTDVVTFVKYKAEGE | |
| | | EAKPVCAYKAESFRGVIRSAVARIHMEDGVPLTELTHS | |
| | | DCECLLCQIFGSEYEAGKIRFEDLVFESDPEPVTFDHV | |
| | | AIDRFTGGAADKKKFDDSPLPGSPARPLMLKGSFWIRR | |
| | | DVLEDEEYCKALGKALADVNNGLYPLGGKSAIGYGQVK | |
| | | SLGIKGDDKRISRLMNPAFDETDVAVPEKPKTDAEVRI | |
| | | EAEKVYYPHYFVEPHKKVEREEKPCGHQKFHEGRLTGK | |
| | | IRCKLITKTPLIVPDTSNDDFFRPADKEARKEKDEYHK | |
| | | SYAFFRLHKQIMIPGSELRGMVSSVYETVTNSCFRIFD | |
| | | ETKRLSWRGGGSRTVDDRMIGKRMSADLRPCHGDWVED | |
| | | GDLSALNAYPEKRLLLRHPKGLCPACRLFGTGSYKGRV | |
| | | RFGFASLENDPEWLIPGKNPGDPFHGGPVMLSLLERPR | |
| | | PTWSIPGSDNKFKVPGRKFYVHHHAWKTIKDGNHPTTG | |
| | | KAIEQSPNNRTVEALAGGNSFSFEIAFENLKEWELGLL | |
| | | IHSLQLEKGLAHKLGMAKSMGFGSVEIDVESVRLRKDW | |
| | | KQWRNGNSEIPNWLGKGFAKLKEWFRDELDFIENLKKL | |
| | | LWFPEGDQAPRVCYPMLRKKDDPNGNSGYEELKRGEFK | |
| | | KEDRQKKLTTPWTPWAMSLYDDLGVETSDSKTEGWSKN | |
| | | FKLLQSQLQVKKAALTQAKSQRTKQSTVLAPVIDLKRG | |
| | | GSSDDRQIVDTPPHVAAGLKDPVPSGFSAGEVLIPLAD | |
| | | EYDPMFPNDYEKVVKRQREERQRQRELERQKEIEEREK | |
| | | RRKDRHEASGFARRPDPDSDEDEDYERERRKRSMGGAA | |
| | | IAPPTSLVEKDKELPRDFPYEEDSRPRSQSSKAAIPPP | |
| | | VYEEQDRPRSPTGPSNSFLANMGGTVAHKIMQKYGFRE | |
| | | GQGLGKHEQGLSTALSVEKTSKRGGKIIVGDATEKDAS | |
| | | KKSDSNPLTEILKCPTKVVLLRNMVGAGEVDEDLEVET | |
| | | KEECEKYGKVGKCVIFEIPGAPDDEAVRIFLEFERVES | |
| | | AIKAVVDLNGRYFGGRVVKACFYNLDKFRVLDLAEQVK | |
| | | RTADGSEFESPKKKRKV | |
| 531 | pDF0954_ | MKRTADGSEFESPKKKRKVTTTMKISIEFLEPFRMTKW | 1451 |
| | SF3B6 | QESTRRNKNNKEFVRGQAFARWHRNKKDNTKGRPYITG | |
| | | TLLRSAVIRSAENLLTLSDGKISEKTCCPGKFDTEDKD | |
| | | RLLQLRQRSTLRWTDKNPCPDNAETYCPFCELLGRSGN | |
| | | DGKKAEKKDWRFRIHFGNLSLPGKPDFDGPKAIGSQRV | |
| | | LNRVDFKSGKAHDFFKAYEVDHTRFPRFEGEITIDNKV | |
| | | SAEARKLLCDSLKFTDRLCGALCVIRFDEYTPAADSGK | |
| | | QTENVQAEPNANLAEKTAEQIISILDDNKKTRYTRLLA | |
| | | DAIRSLRRSSKLVAGLPKDHDGKDDHYLWDIGKKKKDE | |
| | | NSVTIRQILTTSADTKELKNAGKWREFCEKLGEALYLK | |
| | | SKDMSGGLKITRRILGDAEFHGKPDRLEKSRSVSIGSV | |
| | | LKETVVCGELVAKTPFFFGAIDEDAKQTDLQVLLTPDN | |
| | | KYRLPRSAVRGILRRDLQTYFDSPCNAELGGRPCMCKT | |
| | | CRIMRGITVMDARSEYNAPPEIRHRTRINPFTGTVAEG | |
| | | ALFNMEVAPEGIVFPFQLRYRGSEDGLPDALKTVLKWW | |
| | | AEGQAFMSGAASTGKGRFRMENAKYETLDLSDENQRND | |
| | | YLKNWGWRDEKGLEELKKRLNSGLPEPGNYRDPKWHEI | |
| | | NVSIEMASPFINGDPIRAAVDKRGTDVVTFVKYKAEGE | |
| | | EAKPVCAYKAESFRGVIRSAVARIHMEDGVPLTELTHS | |
| | | DCECLLCQIFGSEYEAGKIRFEDLVFESDPEPVTFDHV | |
| | | AIDRFTGGAADKKKFDDSPLPGSPARPLMLKGSFWIRR | |
| | | DVLEDEEYCKALGKALADVNNGLYPLGGKSAIGYGQVK | |
| | | SLGIKGDDKRISRLMNPAFDETDVAVPEKPKTDAEVRI | |
| | | EAEKVYYPHYFVEPHKKVEREEKPCGHQKFHEGRLTGK | |
| | | IRCKLITKTPLIVPDTSNDDFFRPADKEARKEKDEYHK | |
| | | SYAFFRLHKQIMIPGSELRGMVSSVYETVTNSCFRIFD | |
| | | ETKRLSWRGGGSRTVDDRMIGKRMSADLRPCHGDWVED | |
| | | GDLSALNAYPEKRLLLRHPKGLCPACRLFGTGSYKGRV | |
| | | RFGFASLENDPEWLIPGKNPGDPFHGGPVMLSLLERPR | |
| | | PTWSIPGSDNKFKVPGRKFYVHHHAWKTIKDGNHPTTG | |
| | | KAIEQSPNNRTVEALAGGNSFSFEIAFENLKEWELGLL | |
| | | IHSLQLEKGLAHKLGMAKSMGFGSVEIDVESVRLRKDW | |
| | | KQWRNGNSEIPNWLGKGFAKLKEWFRDELDFIENLKKL | |
| | | LWFPEGDQAPRVCYPMLRKKDDPNGNSGYEELKRGEFK | |
| | | KEDRQKKLTTPWTPWAMAMQAAKRANIRLPPEVNRILY | |
| | | IRNLPYKITAEEMYDIFGKYGPIRQIRVGNTPETRGTA | |
| | | YVVYEDIFDAKNACDHLSGFNVCNRYLVVLYYNANRAF | |
| | | QKMDTKKKEEQLKLLKEKYGINTDPPKKRTADGSEFES | |
| | | PKKKRKV | |
| 532 | pDF0954_ | MKRTADGSEFESPKKKRKVTTTMKISIEFLEPFRMTKW | 1566 |
| | U2AF1 | QESTRRNKNNKEFVRGQAFARWHRNKKDNTKGRPYITG | |
| | | TLLRSAVIRSAENLLTLSDGKISEKTCCPGKFDTEDKD | |
| | | RLLQLRQRSTLRWTDKNPCPDNAETYCPFCELLGRSGN | |
| | | DGKKAEKKDWRFRIHFGNLSLPGKPDFDGPKAIGSQRV | |
| | | LNRVDFKSGKAHDFFKAYEVDHTRFPRFEGEITIDNKV | |
| | | SAEARKLLCDSLKFTDRLCGALCVIRFDEYTPAADSGK | |
| | | QTENVQAEPNANLAEKTAEQIISILDDNKKTRYTRLLA | |
| | | DAIRSLRRSSKLVAGLPKDHDGKDDHYLWDIGKKKKDE | |
| | | NSVTIRQILTTSADTKELKNAGKWREFCEKLGEALYLK | |
| | | SKDMSGGLKITRRILGDAEFHGKPDRLEKSRSVSIGSV | |
| | | LKETVVCGELVAKTPFFFGAIDEDAKQTDLQVLLTPDN | |
| | | KYRLPRSAVRGILRRDLQTYFDSPCNAELGGRPCMCKT | |
| | | CRIMRGITVMDARSEYNAPPEIRHRTRINPFTGTVAEG | |
| | | ALFNMEVAPEGIVFPFQLRYRGSEDGLPDALKTVLKWW | |
| | | AEGQAFMSGAASTGKGRFRMENAKYETLDLSDENQRND | |
| | | YLKNWGWRDEKGLEELKKRLNSGLPEPGNYRDPKWHEI | |
| | | NVSIEMASPFINGDPIRAAVDKRGTDVVTFVKYKAEGE | |
| | | EAKPVCAYKAESFRGVIRSAVARIHMEDGVPLTELTHS | |
| | | DCECLLCQIFGSEYEAGKIRFEDLVFESDPEPVTFDHV | |
| | | AIDRFTGGAADKKKFDDSPLPGSPARPLMLKGSFWIRR | |
| | | DVLEDEEYCKALGKALADVNNGLYPLGGKSAIGYGQVK | |
| | | SLGIKGDDKRISRLMNPAFDETDVAVPEKPKTDAEVRI | |
| | | EAEKVYYPHYFVEPHKKVEREEKPCGHQKFHEGRLTGK | |
| | | IRCKLITKTPLIVPDTSNDDFFRPADKEARKEKDEYHK | |
| | | SYAFFRLHKQIMIPGSELRGMVSSVYETVTNSCFRIFD | |
| | | ETKRLSWRGGGSRTVDDRMIGKRMSADLRPCHGDWVED | |
| | | GDLSALNAYPEKRLLLRHPKGLCPACRLFGTGSYKGRV | |
| | | RFGFASLENDPEWLIPGKNPGDPFHGGPVMLSLLERPR | |
| | | PTWSIPGSDNKFKVPGRKFYVHHHAWKTIKDGNHPTTG | |
| | | KAIEQSPNNRTVEALAGGNSFSFEIAFENLKEWELGLL | |
| | | IHSLQLEKGLAHKLGMAKSMGFGSVEIDVESVRLRKDW | |
| | | KQWRNGNSEIPNWLGKGFAKLKEWFRDELDFIENLKKL | |
| | | LWFPEGDQAPRVCYPMLRKKDDPNGNSGYEELKRGEFK | |
| | | KEDRQKKLTTPWTPWAMAEYLASIFGTEKDKVNCSFYF | |
| | | KIGACRHGDRCSRLHNKPTFSQTIALLNIYRNPQNSSQ | |
| | | SADGLRCAVSDVEMQEHYDEFFEEVFTEMEEKYGEVEE | |
| | | MNVCDNLGDHLVGNVYVKFRREEDAEKAVIDLNNRWFN | |
| | | GQPIHAELSPVTDFREACCRQYEMGECTRGGFCNFMHL | |
| | | KPISRELRRELYGRRRKKHRSRSRSRERRSRSRDRGRG | |
| | | GGGGGGGGGGGRERDRRRSRDRERSGRFKRTADGSEFE | |
| | | SPKKKRKV | |
| 533 | pDF0954_ | MKRTADGSEFESPKKKRKVTTTMKISIEFLEPFRMTKW | 1801 |
| | U2AF2 | QESTRRNKNNKEFVRGQAFARWHRNKKDNTKGRPYITG | |
| | | TLLRSAVIRSAENLLTLSDGKISEKTCCPGKFDTEDKD | |
| | | RLLQLRQRSTLRWTDKNPCPDNAETYCPFCELLGRSGN | |
| | | DGKKAEKKDWRFRIHFGNLSLPGKPDFDGPKAIGSQRV | |
| | | LNRVDFKSGKAHDFFKAYEVDHTRFPRFEGEITIDNKV | |
| | | SAEARKLLCDSLKFTDRLCGALCVIRFDEYTPAADSGK | |
| | | QTENVQAEPNANLAEKTAEQIISILDDNKKTRYTRLLA | |
| | | DAIRSLRRSSKLVAGLPKDHDGKDDHYLWDIGKKKKDE | |
| | | NSVTIRQILTTSADTKELKNAGKWREFCEKLGEALYLK | |
| | | SKDMSGGLKITRRILGDAEFHGKPDRLEKSRSVSIGSV | |
| | | LKETVVCGELVAKTPFFFGAIDEDAKQTDLQVLLTPDN | |
| | | KYRLPRSAVRGILRRDLQTYFDSPCNAELGGRPCMCKT | |
| | | CRIMRGITVMDARSEYNAPPEIRHRTRINPFTGTVAEG | |
| | | ALFNMEVAPEGIVFPFQLRYRGSEDGLPDALKTVLKWW | |
| | | AEGQAFMSGAASTGKGRFRMENAKYETLDLSDENQRND | |
| | | YLKNWGWRDEKGLEELKKRLNSGLPEPGNYRDPKWHEI | |
| | | NVSIEMASPFINGDPIRAAVDKRGTDVVTFVKYKAEGE | |
| | | EAKPVCAYKAESFRGVIRSAVARIHMEDGVPLTELTHS | |
| | | DCECLLCQIFGSEYEAGKIRFEDLVFESDPEPVTFDHV | |
| | | AIDRFTGGAADKKKFDDSPLPGSPARPLMLKGSFWIRR | |
| | | DVLEDEEYCKALGKALADVNNGLYPLGGKSAIGYGQVK | |
| | | SLGIKGDDKRISRLMNPAFDETDVAVPEKPKTDAEVRI | |
| | | EAEKVYYPHYFVEPHKKVEREEKPCGHQKFHEGRLTGK | |
| | | IRCKLITKTPLIVPDTSNDDFFRPADKEARKEKDEYHK | |
| | | SYAFFRLHKQIMIPGSELRGMVSSVYETVTNSCFRIFD | |
| | | ETKRLSWRGGGSRTVDDRMIGKRMSADLRPCHGDWVED | |
| | | GDLSALNAYPEKRLLLRHPKGLCPACRLFGTGSYKGRV | |
| | | RFGFASLENDPEWLIPGKNPGDPFHGGPVMLSLLERPR | |
| | | PTWSIPGSDNKFKVPGRKFYVHHHAWKTIKDGNHPTTG | |
| | | KAIEQSPNNRTVEALAGGNSFSFEIAFENLKEWELGLL | |
| | | IHSLQLEKGLAHKLGMAKSMGFGSVEIDVESVRLRKDW | |
| | | KQWRNGNSEIPNWLGKGFAKLKEWFRDELDFIENLKKL | |
| | | LWFPEGDQAPRVCYPMLRKKDDPNGNSGYEELKRGEFK | |
| | | KEDRQKKLTTPWTPWAMSDFDEFERQLNENKQERDKEN | |
| | | RHRKRSHSRSRSRDRKRRSRSRDRRNRDQRSASRDRRR | |
| | | RSKPLTRGAKEEHGGLIRSPRHEKKKKVRKYWDVPPPG | |
| | | FEHITPMQYKAMQAAGQIPATALLPTMTPDGLAVTPTP | |
| | | VPVVGSQMTRQARRLYVGNIPFGITEEAMMDFFNAQMR | |
| | | LGGLTQAPGNPVLAVQINQDKNFAFLEFRSVDETTQAM | |
| | | AFDGIIFQGQSLKIRRPHDYQPLPGMSENPSVYVPGVV | |
| | | STVVPDSAHKLFIGGLPNYLNDDQVKELLTSFGPLKAF | |
| | | NLVKDSATGLSKGYAFCEYVDINVTDQAIAGLNGMQLG | |
| | | DKKLLVQRASVGAKNATLVSPPSTINQTPVTLQVPGLM | |
| | | SSQVQMGGHPTEVLCLMNMVLPEELLDDEEYEEIVEDV | |
| | | RDECSKYGLVKSIEIPRPVDGVEVPGCGKIFVEFTSVF | |
| | | DCQKAMQGLTGRKFANRVVVTKYCDPDSYHRRDFWKRT | |
| | | ADGSEFESPKKKRKV | |
| 534 | Cas7-11 | MKRTADGSEFESPKKKRKVTTTMKISIEFLEPFRMTKW | 1792 |
| | lenti | QESTRRNKNNKEFVRGQAFARWHRNKKDNTKGRPYITG | |
| | | TLLRSAVIRSAENLLTLSDGKISEKTCCPGKFDTEDKD | |
| | | RLLQLRQRSTLRWTDKNPCPDNAETYCPFCELLGRSGN | |
| | | DGKKAEKKDWRFRIHFGNLSLPGKPDFDGPKAIGSQRV | |
| | | LNRVDFKSGKAHDFFKAYEVDHTRFPRFEGEITIDNKV | |
| | | SAEARKLLCDSLKFTDRLCGALCVIRFDEYTPAADSGK | |
| | | QTENVQAEPNANLAEKTAEQIISILDDNKKTEYTRLLA | |
| | | DAIRSLRRSSKLVAGLPKDHDGKDDHKLWDIGKKKKDE | |
| | | NSVTIRQILTTSADTKELKNAGKWREFCEKLGEALYLK | |
| | | SKDMSGGLKITRRILGDAEFHGKPDRLEKSRSVSIGSV | |
| | | LKETVVCGELVAKTPFFFGAIDEDAKQTDLQVLLTPDN | |
| | | KYRLPRSAVRGILRRDLQTYFDSPCNAELGGRPCMCKT | |
| | | CRIMRGITVMDARSEYNAPPEIRHRTRINPFTGTVAEG | |
| | | ALFNMEVAPEGIVFPFQLRYRGSEDGLPDALKTVLKWW | |
| | | AEGQAFMSGAASTGKGRFRMENAKYETLDLSDENQRND | |
| | | YLKNWGWRDEKGLEELKKRLNSGLPEPGNYRDPKWHEI | |
| | | NVSIEMASPFINGDPIRAAVDKRGTDVVTFVKYKAEGE | |
| | | EAKPVCAYKAESFRGVIRSAVARIHMEDGVPLTELTHS | |
| | | DCECLLCQIFGSEYEAGKIRFEDLVFESDPEPVTFDHV | |
| | | AIDRFTGGAADKKKFDDSPLPGSPARPLMLKGSFWIRR | |
| | | DVLEDEEYCKALGKALADVNNGLYPLGGKSAIGYGQVK | |
| | | SLGIKGDDKRISRLMNPAFDETDVAVPEKPKTDAEVRI | |
| | | EAEKVYYPHYFVEPHKKVEREEKPCGHQKFHEGRLTGK | |
| | | IRCKLITKTPLIVPDTSNDDFFRPADKEARKEKDEYHK | |
| | | SYAFFRLHKQIMIPGSELRGMVSSVYETVTNSCFRIFD | |
| | | ETKRLSWRMDADHQNVLQKFLPGRVTADGKHIQKFSET | |
| | | ARVPFYDKTQKHFDILDEQEIAGEKPVRMWVKRFIKRL | |
| | | SLVDPAKHPQKKQDNKWKRRKEGIATFIEQKNGSYYFN | |
| | | VVTNNGCTSFHLWHKPDNFDQEKLEGIQNGEKLDCWVR | |
| | | DSRYQKAFQEIPENDPDGWECKEGYLHVVGPSKVEFSD | |
| | | KKGDVINNFQGTLPSVPNDWKTIRTNDFKNRKRKNEPV | |
| | | FCCEDDKGNYYTMAKYCETFFFDLKENEEYEIPEKARI | |
| | | KYKELLRVYNNNPQAVPESVFQSRVARENVEKLKSGDL | |
| | | VYFKHNEKYVEDIVPVRISRTVDDRMIGKRMSADLRPC | |
| | | HGDWVEDGDLSALNAYPEKRLLLRHPKGLCPACRLFGT | |
| | | GSYKGRVRFGFASLENDPEWLIPGKNPGDPFHGGPVML | |
| | | SLLERPRPTWSIPGSDNKFKVPGRKFYVHHHAWKTIKD | |
| | | GNHPTTGKAIEQSPNNRTVEALAGGNSFSFEIAFENLK | |
| | | EWELGLLIHSLQLEKGLAHKLGMAKSMGFGSVEIDVES | |
| | | VRLRKDWKQWRNGNSEIPNWLGKGFAKLKEWFRDELDF | |
| | | IENLKKLLWFPEGDQAPRVCYPMLRKKDDPNGNSGYEE | |
| | | LKRGEFKKEDRQKKLTTPWTPWAKRTADGSEFESPKKK | |
| | | RKVCTGSGEGRGSLLTCGDVEENPGPMAKPLSQEESTL | |
| | | IERATATINSIPISEDYSVASAALSSDGRIFTGVNVYH | |
| | | FTGGPCAELVVLGTAAAAAAGNLTCIVAIGNENRGILS | |
| | | PCGRCRQVLLDLHPGIKAIVKDSDGQPTAVGIRELLPS | |
| | | GYVWEG | |
| 467 | pDF0952 | MKRTADGSEFESPKKKRKVTTTMKISIEFLEPFRMTKW | 1326 |
| | | QESTRRNKNNKEFVRGQAFARWHRNKKDNTKGRPYITG | |
| | | TLLRSAVIRSAENLLTLSDGKISEKTCCPGKFDTEDKD | |
| | | RLLQLRQRSTLRWTDKNPCPDNAETYCPFCELLGRSGN | |
| | | DGKKAEKKDWRFRIHFGNLSLPGKPDFDGPKAIGSQRV | |
| | | LNRVDFKSGKAHDFFKAYEVDHTRFPRFEGEITIDNKV | |
| | | SAEARKLLCDSLKFTDRLCGALCVIRFDEYTPAADSGK | |
| | | QTENVQAEPNANLAEKTAEQIISILDDNKKTEYTRLLA | |
| | | DAIRSLRRSSKLVAGLPKDHDGKDDHYLWDIGKKKKDE | |
| | | NSVTIRQILTTSADTKELKNAGKWREFCEKLGEALYLK | |
| | | SKDMSGGLKITRRILGDAEFHGKPDRLEKSRSVSIGSV | |
| | | LKETVVCGELVAKTPFFFGAIDEDAKQTDLQVLLTPDN | |
| | | KYRLPRSAVRGILRRDLQTYFDSPCNAELGGRPCMCKT | |
| | | CRIMRGITVMDARSEYNAPPEIRHRTRINPFTGTVAEG | |
| | | ALFNMEVAPEGIVFPFQLRYRGSEDGLPDALKTVLKWW | |
| | | AEGQAFMSGAASTGKGRFRMENAKYETLDLSDENQRND | |
| | | YLKNWGWRDEKGLEELKKRLNSGLPEPGNYRDPKWHEI | |
| | | NVSIEMASPFINGDPIRAAVDKRGTDVVTFVKYKAEGE | |
| | | EAKPVCAYKAESFRGVIRSAVARIHMEDGVPLTELTHS | |
| | | DCECLLCQIFGSEYEAGKIRFEDLVFESDPEPVTFDHV | |
| | | AIDRFTGGAADKKKFDDSPLPGSPARPLMLKGSFWIRR | |
| | | DVLEDEEYCKALGKALADVNNGLYPLGGKSAIGYGQVK | |
| | | SLGIKGDDKRISRLMNPAFDETDVAVPEKPKTDAEVRI | |
| | | EAEKVYYPHYFVEPHKKVEREEKPCGHQKFHEGRLTGK | |
| | | IRCKLITKTPLIVPDTSNDDFFRPADKEARKEKDEYHK | |
| | | SYAFFRLHKQIMIPGSELRGMVSSVYETVTNSCFRIFD | |
| | | ETKRLSWRGGGSRTVDDRMIGKRMSADLRPCHGDWVED | |
| | | GDLSALNAYPEKRLLLRHPKGLCPACRLFGTGSYKGRV | |
| | | REGFASLENDPEWLIPGKNPGDPFHGGPVMLSLLERPR | |
| | | PTWSIPGSDNKFKVPGRKFYVHHHAWKTIKDGNHPTTG | |
| | | KAIEQSPNNRTVEALAGGNSFSFEIAFENLKEWELGLL | |
| | | IHSLQLEKGLAHKLGMAKSMGFGSVEIDVESVRLRKDW | |
| | | KQWRNGNSEIPNWLGKGFAKLKEWERDELDFIENLKKL | |
| | | LWFPEGDQAPRVCYPMLRKKDDPNGNSGYEELKDGEFK | |
| | | KEDRQKKLTTPWTPWAKRTADGSEFESPKKKRKV | |
| 535 | pDF0953 | MKRTADGSEFESPKKKRKVTTTMKISIEFLEPFRMTKW | 1326 |
| | | QESTRRNKNNKEFVRGQAFARWHRNKKDNTKGRPYITG | |
| | | TLLRSAVIRSAENLLTLSDGKISEKTCCPGKFDTEDKD | |
| | | RLLQLRQRSTLRWTDKNPCPDNAETYCPFCELLGRSGN | |
| | | DGKKAEKKDWRFRIHFGNLSLPGKPDFDGPKAIGSQRV | |
| | | LNRVDFKSGKAHDFFKAYEVDHTRFPRFEGEITIDNKV | |
| | | SAEARKLLCDSLKFTDRLCGALCVIRFDEYTPAADSGK | |
| | | QTENVQAEPNANLAEKTAEQIISILDDNKKTEKTRLLA | |
| | | DAIRSLRRSSKLVAGLPKDHDGKDDHYLWDIGKKKKDE | |
| | | NSVTIRQILTTSADTKELKNAGKWREFCEKLGEALYLK | |
| | | SKDMSGGLKITRRILGDAEFHGKPDRLEKSRSVSIGSV | |
| | | LKETVVCGELVAKTPFFFGAIDEDAKQTDLQVLLTPDN | |
| | | KYRLPRSAVRGILRRDLQTYFDSPCNAELGGRPCMCKT | |
| | | CRIMRGITVMDARSEYNAPPEIRHRTRINPFTGTVAEG | |
| | | ALFNMEVAPEGIVFPFQLRYRGSEDGLPDALKTVLKWW | |
| | | AEGQAFMSGAASTGKGRFRMENAKYETLDLSDENQRND | |
| | | YLKNWGWRDEKGLEELKKRLNSGLPEPGNYRDPKWHEI | |
| | | NVSIEMASPFINGDPIRAAVDKRGTDVVTFVKYKAEGE | |
| | | EAKPVCAYKAESFRGVIRSAVARIHMEDGVPLTELTHS | |
| | | DCECLLCQIFGSEYEAGKIRFEDLVFESDPEPVTFDHV | |
| | | AIDRFTGGAADKKKFDDSPLPGSPARPLMLKGSFWIRR | |
| | | DVLEDEEYCKALGKALADVNNGLYPLGGKSAIGYGQVK | |
| | | SLGIKGDDKRISRLMNPAFDETDVAVPEKPKTDAEVRI | |
| | | EAEKVYYPHYFVEPHKKVEREEKPCGHQKFHEGRLTGK | |
| | | IRCKLITKTPLIVPDTSNDDFFRPADKEARKEKDEYHK | |
| | | SYAFFRLHKQIMIPGSELRGMVSSVYETVTNSCFRIFD | |
| | | ETKRLSWRGGGSRTVDDRMIGKRMSADLRPCHGDWVED | |
| | | GDLSALNAYPEKRLLLRHPKGLCPACRLFGTGSYKGRV | |
| | | RFGFASLENDPEWLIPGKNPGDPFHGGPVMLSLLERPR | |
| | | PTWSIPGSDNKFKVPGRKFYVHHHAWKTIKDGNHPTTG | |
| | | KAIEQSPNNRTVEALAGGNSFSFEIAFENLKEWELGLL | |
| | | IHSLQLEKGLAHKLGMAKSMGFGSVEIDVESVRLRKDW | |
| | | KQWRNGNSEIPNWLGKGFAKLKEWFRDELDFIENLKKL | |
| | | LWFPEGDQAPRVCYPMLRKKDDPNGNSGYEELKRGEFK | |
| | | KEDRQKKLTTPWTPWAKRTADGSEFESPKKKRKV | |
| 521 | pDF0954 | MKRTADGSEFESPKKKRKVTTTMKISIEFLEPFRMTKW | 1326 |
| | | QESTRRNKNNKEFVRGQAFARWHRNKKDNTKGRPYITG | |
| | | TLLRSAVIRSAENLLTLSDGKISEKTCCPGKFDTEDKD | |
| | | RLLQLRQRSTLRWTDKNPCPDNAETYCPFCELLGRSGN | |
| | | DGKKAEKKDWRFRIHFGNLSLPGKPDFDGPKAIGSQRV | |
| | | LNRVDFKSGKAHDFFKAYEVDHTRFPRFEGEITIDNKV | |
| | | SAEARKLLCDSLKFTDRLCGALCVIRFDEYTPAADSGK | |
| | | QTENVQAEPNANLAEKTAEQIISILDDNKKTRYTRLLA | |
| | | DAIRSLRRSSKLVAGLPKDHDGKDDHYLWDIGKKKKDE | |
| | | NSVTIRQILTTSADTKELKNAGKWREFCEKLGEALYLK | |
| | | SKDMSGGLKITRRILGDAEFHGKPDRLEKSRSVSIGSV | |
| | | LKETVVCGELVAKTPFFFGAIDEDAKQTDLQVLLTPDN | |
| | | KYRLPRSAVRGILRRDLQTYFDSPCNAELGGRPCMCKT | |
| | | CRIMRGITVMDARSEYNAPPEIRHRTRINPFTGTVAEG | |
| | | ALFNMEVAPEGIVFPFQLRYRGSEDGLPDALKTVLKWW | |
| | | AEGQAFMSGAASTGKGRFRMENAKYETLDLSDENQRND | |
| | | YLKNWGWRDEKGLEELKKRLNSGLPEPGNYRDPKWHEI | |
| | | NVSIEMASPFINGDPIRAAVDKRGTDVVTFVKYKAEGE | |
| | | EAKPVCAYKAESFRGVIRSAVARIHMEDGVPLTELTHS | |
| | | DCECLLCQIFGSEYEAGKIRFEDLVFESDPEPVTFDHV | |
| | | AIDRFTGGAADKKKFDDSPLPGSPARPLMLKGSFWIRR | |
| | | DVLEDEEYCKALGKALADVNNGLYPLGGKSAIGYGQVK | |
| | | SLGIKGDDKRISRLMNPAFDETDVAVPEKPKTDAEVRI | |
| | | EAEKVYYPHYFVEPHKKVEREEKPCGHQKFHEGRLTGK | |
| | | IRCKLITKTPLIVPDTSNDDFFRPADKEARKEKDEYHK | |
| | | SYAFFRLHKQIMIPGSELRGMVSSVYETVTNSCFRIFD | |
| | | ETKRLSWRGGGSRTVDDRMIGKRMSADLRPCHGDWVED | |
| | | GDLSALNAYPEKRLLLRHPKGLCPACRLFGTGSYKGRV | |
| | | RFGFASLENDPEWLIPGKNPGDPFHGGPVMLSLLERPR | |
| | | PTWSIPGSDNKFKVPGRKFYVHHHAWKTIKDGNHPTTG | |
| | | KAIEQSPNNRTVEALAGGNSFSFEIAFENLKEWELGLL | |
| | | IHSLQLEKGLAHKLGMAKSMGFGSVEIDVESVRLRKDW | |
| | | KQWRNGNSEIPNWLGKGFAKLKEWFRDELDFIENLKKL | |
| | | LWFPEGDQAPRVCYPMLRKKDDPNGNSGYEELKRGEFK | |
| | | KEDRQKKLTTPWTPWAKRTADGSEFESPKKKRKV | |
| 479 | pDF0951 | MKRTADGSEFESPKKKRKVTTTMKISIEFLEPFRMTKW | 1637 |
| | quadruple | QESTRRNKNNKEFVRGQAFARWHRNKKDNTKGRPYITG | |
| | mutant | TLLRSAVIRSAENLLTLSDGKISEKTCCPGKFDTEDKD | |
| | | RLLQLRQRSTLRWTDKNPCPDNAETYCPFCELLGRSGN | |
| | | DGKKAEKKDWRFRIHFGNLSLPGKPDFDGPKAIGSQRV | |
| | | LNRVDFKSGKAHDFFKAYEVDHTRFPRFEGEITIDNKV | |
| | | SAEARKLLCDSLKFTDRLCGALCVIRFDEYTPAADSGK | |
| | | QTENVQAEPNANLAEKTAEQIISILDDNKKTEYTRLLA | |
| | | DAIRSLRRSSKLVAGLPKDHDGKDDHKLWDIGKKKKDE | |
| | | NSVTIRQILTTSADTKELKNAGKWREFCEKLGEALYLK | |
| | | SKDMSGGLKITRRILGDAEFHGKPDRLEKSRSVSIGSV | |
| | | LKETVVCGELVAKTPFFFGAIDEDAKQTDLQVLLTPDN | |
| | | KYRLPRSAVRGILRRDLQTYFDSPCNAELGGRPCMCKT | |
| | | CRIMRGITVMDARSEYNAPPEIRHRTRINPFTGTVAEG | |
| | | ALFNMEVAPEGIVFPFQLRYRGSEDGLPDALKTVLKWW | |
| | | AEGQAFMSGAASTGKGRFRMENAKYETLDLSDENQRND | |
| | | YLKNWGWRDEKGLEELKKRLNSGLPEPGNYRDPKWHEI | |
| | | NVSIEMASPFINGDPIRAAVDKRGTDVVTFVKYKAEGE | |
| | | EAKPVCAYKAESFRGVIRSAVARIHMEDGVPLTELTHS | |
| | | DCECLLCQIFGSEYEAGKIRFEDLVFESDPEPVTFDHV | |
| | | AIDRFTGGAADKKKFDDSPLPGSPARPLMLKGSFWIRR | |
| | | DVLEDEEYCKALGKALADVNNGLYPLGGKSAIGYGQVK | |
| | | SLGIKGDDKRISRLMNPAFDETDVAVPEKPKTDAEVRI | |
| | | EAEKVYYPHYFVEPHKKVEREEKPCGHQKFHEGRLTGK | |
| | | IRCKLITKTPLIVPDTSNDDFFRPADKEARKEKDEYHK | |
| | | SYAFFRLHKQIMIPGSELRGMVSSVYETVTNSCFRIFD | |
| | | ETKRLSWRMDAKHQNVLQKFLPGRVTADGKHIQKFSET | |
| | | ARVPFYDKTQKHFDILDEQEIAGEKPVRMWVKRFIKRL | |
| | | SLVDPAKHPQKKQDNKWKRRKEGIATFIEQKNGSYYFN | |
| | | VVTNNGCTSFHLWHKPDNFDQEKLEGIQNGEKLDCWVR | |
| | | DSRYQKAFQEIPENDPDGWECKEGYLHVVGPSKVEFSD | |
| | | KKGDVINNFQGTLPSVPNDWKTIRTNDFKNRKRKNEPV | |
| | | FCCEDDKGNYYTMAKYCETFFFDLKENEEYEIPEKARI | |
| | | KYKELLRVYNNNPQAVPESVFQSRVARENVEKLKSGDL | |
| | | VYFKHNEKYVEDIVPVRISRTVDDRMIGKRMSADLRPC | |
| | | HGDWVEDGDLSALNAYPEKRLLLRHPKGLCPACRLFGT | |
| | | GSYKGRVRFGFASLENDPEWLIPGKNPGDPFHGGPVML | |
| | | SLLERPRPTWSIPGSDNKFKVPGRKFYVHHHAWKTIKD | |
| | | GNHPTTGKAIEQSPNNRTVEALAGGNSFSFEIAFENLK | |
| | | EWELGLLIHSLQLEKGLAHKLGMAKSMGFGSVEIDVES | |
| | | VRLRKDWKQWRNGNSEIPNWLGKGFAKLKEWFRDELDF | |
| | | IENLKKLLWFPEGDQAPRVCYPMLRKKDDPNGNSGYEE | |
| | | LKRGEFKKEDRQKKLTTPWTPWAKRTADGSEFESPKKK | |
| | | RKV | |
| 494 | pDF0964 | MKRTADGSEFESPKKKRKVTTTMKISIEFLEPFRMTKW | 1762 |
| | double | QESTRRNKNNKEFVRGQAFARWHRNKKDNTKGRPYITG | |
| | mutant | TLLRSAVIRSAENLLTLSDGKISEKTCCPGKFDTEDKD | |
| | SF3B6 | RLLQLRQRSTLRWTDKNPCPDNAETYCPFCELLGRSGN | |
| | fusion- | DGKKAEKKDWRFRIHFGNLSLPGKPDFDGPKAIGSQRV | |
| | aRY1589 | LNRVDFKSGKAHDFFKAYEVDHTRFPRFEGEITIDNKV | |
| | B1-C1 | SAEARKLLCDSLKFTDRLCGALCVIRFDEYTPAADSGK | |
| | | QTENVQAEPNANLAEKTAEQIISILDDNKKTEYTRLLA | |
| | | DAIRSLRRSSKLVAGLPKDHDGKDDHYLWDIGKKKKDE | |
| | | NSVTIRQILTTSADTKELKNAGKWREFCEKLGEALYLK | |
| | | SKDMSGGLKITRRILGDAEFHGKPDRLEKSRSVSIGSV | |
| | | LKETVVCGELVAKTPFFFGAIDEDAKQTDLQVLLTPDN | |
| | | KYRLPRSAVRGILRRDLQTYFDSPCNAELGGRPCMCKT | |
| | | CRIMRGITVMDARSEYNAPPEIRHRTRINPFTGTVAEG | |
| | | ALFNMEVAPEGIVFPFQLRYRGSEDGLPDALKTVLKWW | |
| | | AEGQAFMSGAASTGKGRFRMENAKYETLDLSDENQRND | |
| | | YLKNWGWRDEKGLEELKKRLNSGLPEPGNYRDPKWHEI | |
| | | NVSIEMASPFINGDPIRAAVDKRGTDVVTFVKYKAEGE | |
| | | EAKPVCAYKAESFRGVIRSAVARIHMEDGVPLTELTHS | |
| | | DCECLLCQIFGSEYEAGKIRFEDLVFESDPEPVTFDHV | |
| | | AIDRFTGGAADKKKFDDSPLPGSPARPLMLKGSFWIRR | |
| | | DVLEDEEYCKALGKALADVNNGLYPLGGKSAIGYGQVK | |
| | | SLGIKGDDKRISRLMNPAFDETDVAVPEKPKTDAEVRI | |
| | | EAEKVYYPHYFVEPHKKVEREEKPCGHQKFHEGRLTGK | |
| | | IRCKLITKTPLIVPDTSNDDFFRPADKEARKEKDEYHK | |
| | | SYAFFRLHKQIMIPGSELRGMVSSVYETVTNSCFRIFD | |
| | | ETKRLSWRMDADHQNVLQKFLPGRVTADGKHIQKFSET | |
| | | ARVPFYDKTQKHFDILDEQEIAGEKPVRMWVKRFIKRL | |
| | | SLVDPAKHPQKKQDNKWKRRKEGIATFIEQKNGSYYFN | |
| | | VVTNNGCTSFHLWHKPDNFDQEKLEGIQNGEKLDCWVR | |
| | | DSRYQKAFQEIPENDPDGWECKEGYLHVVGPSKVEFSD | |
| | | KKGDVINNFQGTLPSVPNDWKTIRTNDFKNRKRKNEPV | |
| | | FCCEDDKGNYYTMAKYCETFFFDLKENEEYEIPEKARI | |
| | | KYKELLRVYNNNPQAVPESVFQSRVARENVEKLKSGDL | |
| | | VYFKHNEKYVEDIVPVRISRTVDDRMIGKRMSADLRPC | |
| | | HGDWVEDGDLSALNAYPEKRLLLRHPKGLCPACRLFGT | |
| | | GSYKGRVRFGFASLENDPEWLIPGKNPGDPFHGGPVML | |
| | | SLLERPRPTWSIPGSDNKFKVPGRKFYVHHHAWKTIKD | |
| | | GNHPTTGKAIEQSPNNRTVEALAGGNSFSFEIAFENLK | |
| | | EWELGLLIHSLQLEKGLAHKLGMAKSMGFGSVEIDVES | |
| | | VRLRKDWKQWRNGNSEIPNWLGKGFAKLKEWFRDELDF | |
| | | IENLKKLLWFPEGDQAPRVCYPMLRKKDDPNGNSGYEE | |
| | | LKRGEFKKEDRQKKLTTPWTPWAMAMQAAKRANIRLPP | |
| | | EVNRILYIRNLPYKITAEEMYDIFGKYGPIRQIRVGNT | |
| | | PETRGTAYVVYEDIFDAKNACDHLSGFNVCNRYLVVLY | |
| | | YNANRAFQKMDTKKKEEQLKLLKEKYGINTDPPKKRTA | |
| | | DGSEFESPKKKRKV | |
| 495 | pDF0965 | MKRTADGSEFESPKKKRKVTTTMKISIEFLEPFRMTKW | 2112 |
| | double | QESTRRNKNNKEFVRGQAFARWHRNKKDNTKGRPYITG | |
| | mutant | TLLRSAVIRSAENLLTLSDGKISEKTCCPGKFDTEDKD | |
| | U2AF2 | RLLQLRQRSTLRWTDKNPCPDNAETYCPFCELLGRSGN | |
| | fusion- | DGKKAEKKDWRFRIHFGNLSLPGKPDFDGPKAIGSQRV | |
| | aRY1589 | LNRVDFKSGKAHDFFKAYEVDHTRFPRFEGEITIDNKV | |
| | E1 | SAEARKLLCDSLKFTDRLCGALCVIRFDEYTPAADSGK | |
| | | QTENVQAEPNANLAEKTAEQIISILDDNKKTEYTRLLA | |
| | | DAIRSLRRSSKLVAGLPKDHDGKDDHYLWDIGKKKKDE | |
| | | NSVTIRQILTTSADTKELKNAGKWREFCEKLGEALYLK | |
| | | SKDMSGGLKITRRILGDAEFHGKPDRLEKSRSVSIGSV | |
| | | LKETVVCGELVAKTPFFFGAIDEDAKQTDLQVLLTPDN | |
| | | KYRLPRSAVRGILRRDLQTYFDSPCNAELGGRPCMCKT | |
| | | CRIMRGITVMDARSEYNAPPEIRHRTRINPFTGTVAEG | |
| | | ALFNMEVAPEGIVFPFQLRYRGSEDGLPDALKTVLKWW | |
| | | AEGQAFMSGAASTGKGRFRMENAKYETLDLSDENQRND | |
| | | YLKNWGWRDEKGLEELKKRLNSGLPEPGNYRDPKWHEI | |
| | | NVSIEMASPFINGDPIRAAVDKRGTDVVTFVKYKAEGE | |
| | | EAKPVCAYKAESFRGVIRSAVARIHMEDGVPLTELTHS | |
| | | DCECLLCQIFGSEYEAGKIRFEDLVFESDPEPVTFDHV | |
| | | AIDRFTGGAADKKKFDDSPLPGSPARPLMLKGSFWIRR | |
| | | DVLEDEEYCKALGKALADVNNGLYPLGGKSAIGYGQVK | |
| | | SLGIKGDDKRISRLMNPAFDETDVAVPEKPKTDAEVRI | |
| | | EAEKVYYPHYFVEPHKKVEREEKPCGHQKFHEGRLTGK | |
| | | IRCKLITKTPLIVPDTSNDDFFRPADKEARKEKDEYHK | |
| | | SYAFFRLHKQIMIPGSELRGMVSSVYETVTNSCFRIFD | |
| | | ETKRLSWRMDADHQNVLQKFLPGRVTADGKHIQKFSET | |
| | | ARVPFYDKTQKHFDILDEQEIAGEKPVRMWVKRFIKRL | |
| | | SLVDPAKHPQKKQDNKWKRRKEGIATFIEQKNGSYYFN | |
| | | VVTNNGCTSFHLWHKPDNFDQEKLEGIQNGEKLDCWVR | |
| | | DSRYQKAFQEIPENDPDGWECKEGYLHVVGPSKVEFSD | |
| | | KKGDVINNFQGTLPSVPNDWKTIRTNDFKNRKRKNEPV | |
| | | FCCEDDKGNYYTMAKYCETFFFDLKENEEYEIPEKARI | |
| | | KYKELLRVYNNNPQAVPESVFQSRVARENVEKLKSGDL | |
| | | VYFKHNEKYVEDIVPVRISRTVDDRMIGKRMSADLRPC | |
| | | HGDWVEDGDLSALNAYPEKRLLLRHPKGLCPACRLFGT | |
| | | GSYKGRVRFGFASLENDPEWLIPGKNPGDPFHGGPVML | |
| | | SLLERPRPTWSIPGSDNKFKVPGRKFYVHHHAWKTIKD | |
| | | GNHPTTGKAIEQSPNNRTVEALAGGNSFSFEIAFENLK | |
| | | EWELGLLIHSLQLEKGLAHKLGMAKSMGFGSVEIDVES | |
| | | VRLRKDWKQWRNGNSEIPNWLGKGFAKLKEWFRDELDF | |
| | | IENLKKLLWFPEGDQAPRVCYPMLRKKDDPNGNSGYEE | |
| | | LKRGEFKKEDRQKKLTTPWTPWAMSDFDEFERQLNENK | |
| | | QERDKENRHRKRSHSRSRSRDRKRRSRSRDRRNRDQRS | |
| | | ASRDRRRRSKPLTRGAKEEHGGLIRSPRHEKKKKVRKY | |
| | | WDVPPPGFEHITPMQYKAMQAAGQIPATALLPTMTPDG | |
| | | LAVTPTPVPVVGSQMTRQARRLYVGNIPFGITEEAMMD | |
| | | FFNAQMRLGGLTQAPGNPVLAVQINQDKNFAFLEFRSV | |
| | | DETTQAMAFDGIIFQGQSLKIRRPHDYQPLPGMSENPS | |
| | | VYVPGVVSTVVPDSAHKLFIGGLPNYLNDDQVKELLTS | |
| | | FGPLKAFNLVKDSATGLSKGYAFCEYVDINVTDQAIAG | |
| | | LNGMQLGDKKLLVQRASVGAKNATLVSPPSTINQTPVT | |
| | | LQVPGLMSSQVQMGGHPTEVLCLMNMVLPEELLDDEEY | |
| | | EEIVEDVRDECSKYGLVKSIEIPRPVDGVEVPGCGKIF | |
| | | VEFTSVFDCQKAMQGLTGRKFANRVVVTKYCDPDSYHR | |
| | | RDFWKRTADGSEFESPKKKRKV | |
| 496 | pDF0966 | MKRTADGSEFESPKKKRKVTTTMKISIEFLEPFRMTKW | 1762 |
| | triple | QESTRRNKNNKEFVRGQAFARWHRNKKDNTKGRPYITG | |
| | mutant | TLLRSAVIRSAENLLTLSDGKISEKTCCPGKFDTEDKD | |
| | SF3B6 | RLLQLRQRSTLRWTDKNPCPDNAETYCPFCELLGRSGN | |
| | fusion- | DGKKAEKKDWRFRIHFGNLSLPGKPDFDGPKAIGSQRV | |
| | aRY1589 | LNRVDFKSGKAHDFFKAYEVDHTRFPRFEGEITIDNKV | |
| | C2-D2 | SAEARKLLCDSLKFTDRLCGALCVIRFDEYTPAADSGK | |
| | | QTENVQAEPNANLAEKTAEQIISILDDNKKTEYTRLLA | |
| | | DAIRSLRRSSKLVAGLPKDHDGKDDHYLWDIGKKKKDE | |
| | | NSVTIRQILTTSADTKELKNAGKWREFCEKLGEALYLK | |
| | | SKDMSGGLKITRRILGDAEFHGKPDRLEKSRSVSIGSV | |
| | | LKETVVCGELVAKTPFFFGAIDEDAKQTDLQVLLTPDN | |
| | | KYRLPRSAVRGILRRDLQTYFDSPCNAELGGRPCMCKT | |
| | | CRIMRGITVMDARSEYNAPPEIRHRTRINPFTGTVAEG | |
| | | ALFNMEVAPEGIVFPFQLRYRGSEDGLPDALKTVLKWW | |
| | | AEGQAFMSGAASTGKGRFRMENAKYETLDLSDENQRND | |
| | | YLKNWGWRDEKGLEELKKRLNSGLPEPGNYRDPKWHEI | |
| | | NVSIEMASPFINGDPIRAAVDKRGTDVVTFVKYKAEGE | |
| | | EAKPVCAYKAESFRGVIRSAVARIHMEDGVPLTELTHS | |
| | | DCECLLCQIFGSEYEAGKIRFEDLVFESDPEPVTFDHV | |
| | | AIDRFTGGAADKKKFDDSPLPGSPARPLMLKGSFWIRR | |
| | | DVLEDEEYCKALGKALADVNNGLYPLGGKSAIGYGQVK | |
| | | SLGIKGDDKRISRLMNPAFDETDVAVPEKPKTDAEVRI | |
| | | EAEKVYYPHYFVEPHKKVEREEKPCGHQKFHEGRLTGK | |
| | | IRCKLITKTPLIVPDTSNDDFFRPADKEARKEKDEYHK | |
| | | SYAFFRLHKQIMIPGSELRGMVSSVYETVTNSCFRIFD | |
| | | ETKRLSWRMDAKHQNVLQKFLPGRVTADGKHIQKFSET | |
| | | ARVPFYDKTQKHFDILDEQEIAGEKPVRMWVKRFIKRL | |
| | | SLVDPAKHPQKKQDNKWKRRKEGIATFIEQKNGSYYFN | |
| | | VVTNNGCTSFHLWHKPDNFDQEKLEGIQNGEKLDCWVR | |
| | | DSRYQKAFQEIPENDPDGWECKEGYLHVVGPSKVEFSD | |
| | | KKGDVINNFQGTLPSVPNDWKTIRTNDFKNRKRKNEPV | |
| | | FCCEDDKGNYYTMAKYCETFFFDLKENEEYEIPEKARI | |
| | | KYKELLRVYNNNPQAVPESVFQSRVARENVEKLKSGDL | |
| | | VYFKHNEKYVEDIVPVRISRTVDDRMIGKRMSADLRPC | |
| | | HGDWVEDGDLSALNAYPEKRLLLRHPKGLCPACRLFGT | |
| | | GSYKGRVRFGFASLENDPEWLIPGKNPGDPFHGGPVML | |
| | | SLLERPRPTWSIPGSDNKFKVPGRKFYVHHHAWKTIKD | |
| | | GNHPTTGKAIEQSPNNRTVEALAGGNSFSFEIAFENLK | |
| | | EWELGLLIHSLQLEKGLAHKLGMAKSMGFGSVEIDVES | |
| | | VRLRKDWKQWRNGNSEIPNWLGKGFAKLKEWFRDELDF | |
| | | IENLKKLLWFPEGDQAPRVCYPMLRKKDDPNGNSGYEE | |
| | | LKRGEFKKEDRQKKLTTPWTPWAMAMQAAKRANIRLPP | |
| | | EVNRILYIRNLPYKITAEEMYDIFGKYGPIRQIRVGNT | |
| | | PETRGTAYVVYEDIFDAKNACDHLSGFNVCNRYLVVLY | |
| | | YNANRAFQKMDTKKKEEQLKLLKEKYGINTDPPKKRTA | |
| | | DGSEFESPKKKRKV | |
| 497 | pDF0967 | MKRTADGSEFESPKKKRKVTTTMKISIEFLEPFRMTKW | 2112 |
| | triple | QESTRRNKNNKEFVRGQAFARWHRNKKDNTKGRPYITG | |
| | mutant | TLLRSAVIRSAENLLTLSDGKISEKTCCPGKFDTEDKD | |
| | U2AF2 | RLLQLRQRSTLRWTDKNPCPDNAETYCPFCELLGRSGN | |
| | fusion- | DGKKAEKKDWRFRIHFGNLSLPGKPDFDGPKAIGSQRV | |
| | aRY1589 | LNRVDFKSGKAHDFFKAYEVDHTRFPRFEGEITIDNKV | |
| | E2-F2- | SAEARKLLCDSLKFTDRLCGALCVIRFDEYTPAADSGK | |
| | G2-H2 | QTENVQAEPNANLAEKTAEQIISILDDNKKTEYTRLLA | |
| | | DAIRSLRRSSKLVAGLPKDHDGKDDHYLWDIGKKKKDE | |
| | | NSVTIRQILTTSADTKELKNAGKWREFCEKLGEALYLK | |
| | | SKDMSGGLKITRRILGDAEFHGKPDRLEKSRSVSIGSV | |
| | | LKETVVCGELVAKTPFFFGAIDEDAKQTDLQVLLTPDN | |
| | | KYRLPRSAVRGILRRDLQTYFDSPCNAELGGRPCMCKT | |
| | | CRIMRGITVMDARSEYNAPPEIRHRTRINPFTGTVAEG | |
| | | ALFNMEVAPEGIVFPFQLRYRGSEDGLPDALKTVLKWW | |
| | | AEGQAFMSGAASTGKGRFRMENAKYETLDLSDENQRND | |
| | | YLKNWGWRDEKGLEELKKRLNSGLPEPGNYRDPKWHEI | |
| | | NVSIEMASPFINGDPIRAAVDKRGTDVVTFVKYKAEGE | |
| | | EAKPVCAYKAESFRGVIRSAVARIHMEDGVPLTELTHS | |
| | | DCECLLCQIFGSEYEAGKIRFEDLVFESDPEPVTFDHV | |
| | | AIDRFTGGAADKKKFDDSPLPGSPARPLMLKGSFWIRR | |
| | | DVLEDEEYCKALGKALADVNNGLYPLGGKSAIGYGQVK | |
| | | SLGIKGDDKRISRLMNPAFDETDVAVPEKPKTDAEVRI | |
| | | EAEKVYYPHYFVEPHKKVEREEKPCGHQKFHEGRLTGK | |
| | | IRCKLITKTPLIVPDTSNDDFFRPADKEARKEKDEYHK | |
| | | SYAFFRLHKQIMIPGSELRGMVSSVYETVTNSCFRIFD | |
| | | ETKRLSWRMDAKHQNVLQKFLPGRVTADGKHIQKFSET | |
| | | ARVPFYDKTQKHFDILDEQEIAGEKPVRMWVKRFIKRL | |
| | | SLVDPAKHPQKKQDNKWKRRKEGIATFIEQKNGSYYFN | |
| | | VVTNNGCTSFHLWHKPDNFDQEKLEGIQNGEKLDCWVR | |
| | | DSRYQKAFQEIPENDPDGWECKEGYLHVVGPSKVEFSD | |
| | | KKGDVINNFQGTLPSVPNDWKTIRTNDFKNRKRKNEPV | |
| | | FCCEDDKGNYYTMAKYCETFFFDLKENEEYEIPEKARI | |
| | | KYKELLRVYNNNPQAVPESVFQSRVARENVEKLKSGDL | |
| | | VYFKHNEKYVEDIVPVRISRTVDDRMIGKRMSADLRPC | |
| | | HGDWVEDGDLSALNAYPEKRLLLRHPKGLCPACRLFGT | |
| | | GSYKGRVRFGFASLENDPEWLIPGKNPGDPFHGGPVML | |
| | | SLLERPRPTWSIPGSDNKFKVPGRKFYVHHHAWKTIKD | |
| | | GNHPTTGKAIEQSPNNRTVEALAGGNSFSFEIAFENLK | |
| | | EWELGLLIHSLQLEKGLAHKLGMAKSMGFGSVEIDVES | |
| | | VRLRKDWKQWRNGNSEIPNWLGKGFAKLKEWFRDELDF | |
| | | IENLKKLLWFPEGDQAPRVCYPMLRKKDDPNGNSGYEE | |
| | | LKRGEFKKEDRQKKLTTPWTPWAMSDFDEFERQLNENK | |
| | | QERDKENRHRKRSHSRSRSRDRKRRSRSRDRRNRDQRS | |
| | | ASRDRRRRSKPLTRGAKEEHGGLIRSPRHEKKKKVRKY | |
| | | WDVPPPGFEHITPMQYKAMQAAGQIPATALLPTMTPDG | |
| | | LAVTPTPVPVVGSQMTRQARRLYVGNIPFGITEEAMMD | |
| | | FFNAQMRLGGLTQAPGNPVLAVQINQDKNFAFLEFRSV | |
| | | DETTQAMAFDGIIFQGQSLKIRRPHDYQPLPGMSENPS | |
| | | VYVPGVVSTVVPDSAHKLFIGGLPNYLNDDQVKELLTS | |
| | | FGPLKAFNLVKDSATGLSKGYAFCEYVDINVTDQAIAG | |
| | | LNGMQLGDKKLLVQRASVGAKNATLVSPPSTINQTPVT | |
| | | LQVPGLMSSQVQMGGHPTEVLCLMNMVLPEELLDDEEY | |
| | | EEIVEDVRDECSKYGLVKSIEIPRPVDGVEVPGCGKIF | |
| | | VEFTSVFDCQKAMQGLTGRKFANRVVVTKYCDPDSYHR | |
| | | RDFWKRTADGSEFESPKKKRKV | |
| 535 | pDF0953_ | MKRTADGSEFESPKKKRKVTTTMKISIEFLEPFRMTKW | 1326 |
| | Cas711S- | QESTRRNKNNKEFVRGQAFARWHRNKKDNTKGRPYITG | |
| | Y280K- | TLLRSAVIRSAENLLTLSDGKISEKTCCPGKFDTEDKD | |
| | D1580R | RLLQLRQRSTLRWTDKNPCPDNAETYCPFCELLGRSGN | |
| | | DGKKAEKKDWRFRIHFGNLSLPGKPDFDGPKAIGSQRV | |
| | | LNRVDFKSGKAHDFFKAYEVDHTRFPRFEGEITIDNKV | |
| | | SAEARKLLCDSLKFTDRLCGALCVIRFDEYTPAADSGK | |
| | | QTENVQAEPNANLAEKTAEQIISILDDNKKTEKTRLLA | |
| | | DAIRSLRRSSKLVAGLPKDHDGKDDHYLWDIGKKKKDE | |
| | | NSVTIRQILTTSADTKELKNAGKWREFCEKLGEALYLK | |
| | | SKDMSGGLKITRRILGDAEFHGKPDRLEKSRSVSIGSV | |
| | | LKETVVCGELVAKTPFFFGAIDEDAKQTDLQVLLTPDN | |
| | | KYRLPRSAVRGILRRDLQTYFDSPCNAELGGRPCMCKT | |
| | | CRIMRGITVMDARSEYNAPPEIRHRTRINPFTGTVAEG | |
| | | ALFNMEVAPEGIVFPFQLRYRGSEDGLPDALKTVLKWW | |
| | | AEGQAFMSGAASTGKGRFRMENAKYETLDLSDENQRND | |
| | | YLKNWGWRDEKGLEELKKRLNSGLPEPGNYRDPKWHEI | |
| | | NVSIEMASPFINGDPIRAAVDKRGTDVVTFVKYKAEGE | |
| | | EAKPVCAYKAESFRGVIRSAVARIHMEDGVPLTELTHS | |
| | | DCECLLCQIFGSEYEAGKIRFEDLVFESDPEPVTFDHV | |
| | | AIDRFTGGAADKKKFDDSPLPGSPARPLMLKGSFWIRR | |
| | | DVLEDEEYCKALGKALADVNNGLYPLGGKSAIGYGQVK | |
| | | SLGIKGDDKRISRLMNPAFDETDVAVPEKPKTDAEVRI | |
| | | EAEKVYYPHYFVEPHKKVEREEKPCGHQKFHEGRLTGK | |
| | | IRCKLITKTPLIVPDTSNDDFFRPADKEARKEKDEYHK | |
| | | SYAFFRLHKQIMIPGSELRGMVSSVYETVTNSCFRIFD | |
| | | ETKRLSWRGGGSRTVDDRMIGKRMSADLRPCHGDWVED | |
| | | GDLSALNAYPEKRLLLRHPKGLCPACRLFGTGSYKGRV | |
| | | RFGFASLENDPEWLIPGKNPGDPFHGGPVMLSLLERPR | |
| | | PTWSIPGSDNKFKVPGRKFYVHHHAWKTIKDGNHPTTG | |
| | | KAIEQSPNNRTVEALAGGNSFSFEIAFENLKEWELGLL | |
| | | IHSLQLEKGLAHKLGMAKSMGFGSVEIDVESVRLRKDW | |
| | | KQWRNGNSEIPNWLGKGFAKLKEWFRDELDFIENLKKL | |
| | | LWFPEGDQAPRVCYPMLRKKDDPNGNSGYEELKRGEFK | |
| | | KEDRQKKLTTPWTPWAKRTADGSEFESPKKKRKV | |
| | PDF1042 | | 0 |
| | USF1 OE | | |
| | target | | |

[0247] Table 16 shows the potential DNA sequences from Table 15 proteins for nuclease/reporter constructs.

Lengthy table referenced here
US20240100192A1-20240328-T00001
Please refer to the end of the specification for access instructions.

### EXAMPLES

[0248] While several experimental Examples are contemplated, these Examples are intended to be non-limiting.

### Example 1. RNA Writing with Cas7-11 Via 3′ Trans Splicing

[0249] RNA writing with Cas7-11 via 3′ trans splicing and reconstituting full-length luciferase using same was demonstrated (FIG. 1). The targeted transcript only has the N-terminal Gluc fragment and is missing the rest of the protein. The trans-splicing template contains the C-terminal Gluc fragment, the 3′ splicing site signal, a branch point sequence, and poly pyrimidine tract (PPT). Splicing requires the presence of three main signals that directly participate in the reaction and that are present in every intron: the 5′ splice site (5SS); the 3′ splice site (3SS); and the branch point (BP). These signals, along with the polypyrimidine tract (PPT), are critical for correct spliceosome assembly. The trans-splicing template has a guide sequence that binds in the intron at the point we want RNA writing to begin (here it is intron 46). By using Cas7-11 to then cleave in the intron downstream of this trans-splicing template cargo guide, the normal downstream exons that would be competing for splicing with the trans-splicing template can be cleaved off. Using this approach, any single base edit, any sized insertion or any sized deletion can be made, providing new options for RNA based prevention and treatment of disease. These include, for example and without limitation, triplet repeat disorders, Rett syndrome, and Stargardt's disease.

[0250] Regarding the Luciferase analysis of trans-splicing efficiency, the medium containing the secreted luciferase was collected after 72 hours and its activity was measured using the Gaussia Luciferase Assay reagent (GAR-2B; Targeting Systems) and Cypridina (Vargula) luciferase assay reagent (VLAR-2; Targeting Systems) kits. Assays were performed in white 96-well plates on a plate reader (Biotek Synergy Neo 2) with an injection protocol. Luciferase measurements were normalized by dividing the Gluc values by the Cluc values, thus normalizing for any variation between wells.

### Example 2. RNA Writing with Cas7-11 Via 5′ Trans Splicing

[0251] RNA writing with Cas7-11 via 5′ trans splicing and reconstituting full-length luciferase using same was demonstrated (FIG. 2). The targeted transcript only has the C-terminal Gluc fragment and is missing the rest of the protein. The trans-splicing template contains the N-terminal Gluc fragment and the 5′ splicing site signal. Splicing requires the presence of three main signals that directly participate in the reaction and that are present in every intron: the 5′ splice site (5SS); the 3′ splice site (3SS); and the branch point (BP). These signals, along with the polypyrimidine tract (PPT), are critical for correct spliceosome assembly. The trans-splicing template has a guide sequence that binds in the intron at the point we want RNA writing to begin (here it is intron 48). By using Cas7-11 to then cleave in the intron upstream of this trans-splicing template cargo guide, the normal upstream exons that would be competing for splicing can cleaved off with the trans splicing template.

### Example 3. RNA Writing with Cas7-11 Via Internal Trans Splicing

[0252] RNA writing with Cas7-11 via internal trans splicing and reconstituting full-length luciferase using same was demonstrated (FIG. 3). The targeted transcript only has the N and C terminal Gluc fragments and is missing the internal part of the protein. The trans-splicing template contains the internal Gluc fragment, the 3′ splicing site signal, 5′ splicing site signal, a branch point sequence, and poly pyrimidine tract (PPT). Splicing requires the presence of three main signals that directly participate in the reaction and that are present in every intron: the 5′ splice site (5SS); the 3′ splice site (3SS); and the branch point (BP). These signals, along with the polypyrimidine tract (PPT), are critical for correct spliceosome assembly. The trans-splicing template has a guide sequence that binds in the upstream (here intron 46) and downstream intron (here it is intron 48) at the point we want RNA writing to begin. By using Cas7-11 to then cleave in the intron in between the trans-splicing template guides, the normal internal exons that would be competing for splicing with can be cleaved off with the trans splicing template.

[0253] Internal trans splicing can be useful because it involves a small template replacing just the exon that needs to be targeted. 3′ and 5′ trans splicing can involve large sequence replacement on the order of thousands of base pairs. Exons, however, are generally only a few hundred bases meaning internal trans splicing can have a smaller trans splicing template, making cell delivery easier.

### Example 4. 3′ Trans-Splicing Activity on a 5′-Fragment of Gluc Pre-mRNA Target

[0254] The 3′ trans-splicing activity on a 5′-fragment of Gluc pre-mRNA target (1-76 aa) was demonstrated (FIGS. 4A and 4B). A luciferase reporter to readout the efficiency of this process was developed. The luciferase reporter has the N-terminal fragment of Gluc and the missing C-terminal fragment can be supplied via Cas7-11 induced trans splicing. The trans splicing template contains the C-terminal Gluc fragment, the 3′ splicing site signal, a branch point sequence, and poly pyrimidine tract (PPT). Splicing requires the presence of three main signals that directly participate in the reaction and that are present in every intron: the 5′ splice site (5SS); the 3′ splice site (3SS); and the branch point (BP). These signals, along with the polypyrimidine tract (PPT), are critical for correct spliceosome assembly. The trans splicing template has a guide sequence that binds in the intron at the point we want RNA writing to begin (here it is intron 46). The cargo template was designed by fusing the following components (5′-3′): 80 bp binding domain to intron 46 of human COL7A1, 31 bp spacer-branch point-poly pyrimidine tract-3′ splicing site (AACGAGGAATTCTCTTCTTTTTTTTCTGCAG (SEQ ID NO: 610)), and Gluc 77-185aa coding sequence (with a single nucleotide difference from the target transcript). By using Cas7-11 to then cleave in the intron downstream of this trans template cargo guide, the normal downstream exons that would be competing for splicing with can be cleaved of with the trans splicing template. This, as shown in the heatmap, significantly boosts the rate of trans splicing.

[0255] The data shows that the choice of both Cargo guide and Cas7-11 guide are essential for effective trans-splicing, and that there are non-obvious rules for programming and design. In addition, the data show that localization of the Cas7-11 protein, via the NLS, can yield significant improvements to the efficiency of the trans splicing. Furthermore, the data show that editing is dependent on the cleavage activity of Cas7-11, as the “dhuDiCas7-11” variants had no improvement in activity versus the non-targeting guides.

[0256] FIG. 4A shows a schematic illustrating the DiCas7-11-assisted 3′ trans-splicing through target transcript cleavage. FIG. 4B shows a heat chart illustrating trans-splicing activity for Cargo template and Cas7-11 guides targets COL7A1 intron 46 sequence, which was placed upstream of the 5′-fragment of Gluc pre-mRNA target (intron 46 of human COL7A1 gene was inserted to the 3′ end of Glue 1-76 aa coding sequence). Successful trans-splicing resulted in an mRNA that encodes the full length Gluc protein. Trans-splicing efficiency was represented by Gluc chemiluminescence signal and normalized to Cluc signal, the latter of which was constantly expressed. Gluc/Cluc value for each condition was normalized to that with scrambled cargo template, non-targeting Cas7-11 guide, and NLS-dhuDiCas7-11-NLS (NT: scrambled non-targeting guide. BP: branch point. PPT: poly pyrimidine tract. SS: splice site).

### Example 5. 3′ Trans-Splicing Activity on 5′-Fragment of Gluc Pre-mRNA Target with Selected Cas7-11 Guides

[0257] 3′ trans-splicing activity on the 5′-fragment of Gluc pre-mRNA target (1-76 aa) with midi prepped plasmids and a smaller panel of Cas7-11 guides was assessed (FIGS. 5A and 5B). Cargo template and Cas7-11 guides targeted COL7A1 intron 48 sequence (intron 48 of human COL7A1 gene was inserted between Gluc 1-36aa and 77-185aa coding sequences). Successful trans-splicing resulted in an mRNA that encodes the full length Gluc protein.

[0258] FIG. 5A is a heat chart showing the trans-splicing efficiency represented by Gluc chemiluminescence signal and normalized to Cluc signal, the latter of which was constantly expressed. Gluc/Cluc value for each condition was normalized to that with scrambled cargo, non-targeting Cas7-11 guide, and NLS-dhuDiCas7-11-NLS. FIG. 5B is a heat chart showing the trans-splicing efficiency measured by NGS and probing for a single nucleotide change between the targeted pre-mRNA transcript and the cargo template. Trans-splicing efficiency was normalized to that with scrambled cargo template, non-targeting Cas7-11 guide, and NLS-dhuDiCas7-11-NLS. NT: scrambled non-targeting guide.

[0259] Regarding the NGS analysis of trans-splicing efficiency, cells were lysed after 72 hours by RNA lysis buffer (see, e.g., www.ncbi.nlm.nih.gov/pmc/articles/PMC5526071) for 8 min at room temperature and then stopped by 1/10 volume of RNA lysis stop buffer. Cell lysate was then used for first strand synthesis using the RevertAid First Strand cDNA Synthesis Kit (Thermo Fisher) with dT18 primer (SEQ ID NO: 611) or a gene specific primer. cDNA was then used for PCR amplification of the trans-splicing junction and sequenced with Illumina MiSeq. NGS data was analyzed by probing for the single nucleotide change between the targeted transcript and the cargo template.

[0260] Larger fold changes were obtained with some of the cargo guides and Cas7-11 guide combos with higher quality plasmid preps. The fold change by sequencing which shows that there are RNA level changes that match the protein level increases. It was observed that efficiency is dependent on four factors: cargo guide sequence and location, Cas7-11 guide sequence and location, localization of the Cas7-11 construct, and active RNA cleavage activity by the Cas7-11 construct.

### Example 6. Internal Trans-Splicing Activity on the Gluc Pre-mRNA Target

[0261] Internal trans-splicing activity on the Gluc pre-mRNA target, with 3×STOP codon inserted to the 37-76 aa coding sequenced flanked by intron 46 and intron 48 of COL7A1 in the targeted Gluc pre-mRNA was assessed (FIGS. 6A, 6B, and 6C). Intron 46 of human COL7A1 gene was inserted between Gluc 1-36aa and 37-76aa coding sequences, intron 48 of human COL7A1 gene was inserted between Gluc 37-76aa and 77-185aa coding sequences. In this reporter, three consecutive stop codons replaced 56-58aa to suppress Gluc expression in cis-splicing. The cargo template was designed by fusing the following components (5′-3′): 80 bp binding domain to intron 46 of human COL7A1, 31 bp spacer-branch point-poly pyrimidine tract-3′ splicing site (AACGAGGAATTCTCTTCTTTTTTTTCTGCAG (SEQ ID NO: 610)), Gluc 37-76aa coding sequence, 16 bp 5′ splice donor (GTAAGC)-spacer, and 80 bp binding domain to intron 48 of human COL7A1Successful trans-splicing resulted in an mRNA without cryptic stop codons for the expression of full length Gluc protein.

[0262] A schematic showing the DiCas7-11-assisted internal trans-splicing through target transcript cleavage is provided in FIG. 6A. A heat chart showing the trans-splicing efficiency represented by Gluc chemiluminescence signal and normalized to Cluc signal, the latter of which was constantly expressed, is presented in FIG. 6B. Gluc/Cluc value for each condition was normalized to that with scrambled cargo, non-targeting Cas7-11 guide, and NLS-dhuDiCas7-11-NLS. A heat chart showing the trans-splicing efficiency measured by NGS and probing for the replacement of 3×stop codon from the targeted pre-mRNA transcript to the cargo template is presented in FIG. 6C. Trans-splicing efficiency is represented by the percentage of reads carrying read-through codons (non-3×STOP codon) over all amplicons (NT: scrambled non-targeting guide; BP: branch point; PPT: poly pyrimidine tract; and SS: splice site).

[0263] It was observed that certain cargo guides work better with specific Cas7-11 guides to enable up to 185-fold protein activation. Internal trans splicing has for advantage to enable the replacement of a single exon, which can be on average a few hundred bases. 5′ and 3′ trans splicing can involve replacing thousands of base pairs of RNA transcript whereas internal trans splicing results in much smaller modifications, which are simpler and make delivery to cells easier.

[0264] It was observed that efficiency is dependent on multiple factors: cargo guide sequences and location, Cas7-11 guide sequences and location, and active RNA cleavage activity by the Cas7-11 construct. Since two cargo guides and two Cas7-11 guides are needed, there are additional parameters for optimization, and a successful construct can be generated by a combination of all these components. For instance, it was observed that the guide targeting intron 46 has a strong influence on the efficiency of the outcome.

[0265] It was observed that luciferase is not necessarily concordant with NGS readout efficiency, potentially due to the degradation of the wild-type transcript which increases the relative editing efficiencies in some NGS conditions. However, many similar trends with regards to guide selection hold.

### Example 7. 3′ Trans-Splicing Activity on Endogenous Pre-mRNA Targets in HEK293FT Cells

[0266] The 3′ trans-splicing activity on two endogenous pre-mRNA targets, MALAT1 and STAT3 transcripts, in HEK293FT cells were assessed. Trans-splicing efficiency was determined by NGS, probing for a single nucleotide change between the targeted pre-mRNA transcript and the cargo template.

[0267] Mammalian experiments were performed using the HEK293FT cell line, acquired from and authenticated by Thermo Fisher Scientific (R70007). HEK293FT cells were grown at 37° C. and 5% CO₂ in Dulbecco's modified Eagle medium with high glucose, sodium pyruvate and GlutaMAX (Thermo Fisher Scientific), supplemented with 1× penicillin-streptomycin (Thermo Fisher Scientific) and 10% fetal bovine serum (Thermo Fisher Scientific), and passaged using TrypLE Express (Thermo Fisher Scientific). For transfection, the HEK293FT cells were plated 16 h before transfection at seeding densities of 1.5×10⁴ cells per well, allowing cells to reach 90% confluency before the transfection. Cells were then transfected with Lipofectamine 3000 (Thermo Fisher Scientific), following the manufacturer's protocol with 10 ng of part or all of the following components (target Gluc-Clue plasmid, cargo template plasmid, Cas7-11 expression plasmid, and Cas7-11 guide expression plasmid) and pUC19 as a stuffer plasmid to make up a total of 100 ng plasmid per well.

[0268] The cargo template was designed by fusing the following components (5′-3′): 80 bp binding domain to intron 46 of human COL7A1, 31 bp spacer-branch point-poly pyrimidine tract-3′ splicing site (AACGAGGAATTCTCTTCTTTTTTTTCTGCAG (SEQ ID NO: 610)), and Gluc 77-185aa coding sequence (with a single nucleotide difference from the target transcript). For endogenous targets, the exon immediately following the targeted intron replaced the Gluc 77-185aa coding sequence (with a single nucleotide difference from the target transcript).

[0269] Results are shown in FIGS. 7A and 7B. FIG. 7A is a heat chart showing the transfection of three different cargo templates in combination with Cas7-11 and guides for targeting of intron 2 of MALAT pre-mRNA (the heatmap is percent editing as measured by NGS). FIG. 7B is a heat chart showing the transfection of three different cargo templates in combination with Cas7-11 and guides for targeting of intron 5 of STAT3 pre-mRNA (the heatmap is percent editing as measured by NGS).

[0270] It was observed by RNA editing (NGS readout) that high editing can be achieved with Cas7-11 induced trans splicing. Without cas7-11 (non-targeting guides or NT) the trans splicing efficiency was found to be lower. It was also observed that the selection of the Cas7-11 and cargo guide is key, with synergistic effects, and Cas7-11 cleavage is required.

[0271] Additional results are shown in FIGS. 8 and 9. FIG. 8 is a heat chart showing that the STAT3 is similar to the last slide except with even better editing due to better transfection conditions showing that we can improve 3′ TS on STAT3 by up to 60-fold and up to about 29.7% editing. FIG. 9 is a gel stained via western blot that was prepared to probe if protein level effects can be seen from the 3′ TS of STAT3 presented in FIG. 8. Since the trans splicing with Cas7-11 truncates the STAT3 protein, a shift in protein size from 86 kDA to 22 kDA was expected. Smaller STAT3 protein showing up in lanes 1 and 3 were observed, which corresponds to some of the conditions with the highest trans splicing efficiency in FIG. 8. This indicates that proteins in cells can be changed via RNA writing.

### Example 8. 3′ Trans-Splicing Activity on the 5′-Fragment of Gluc Pre-mRNA Target with a Fusion of Cargo Guide and Cas7-11 Guide

[0272] 3′ trans-splicing activity on a 5′-fragment of Gluc pre-mRNA target with a pre-crRNA-cargo binding domain-Gluc 77-185aa cargo template was assessed (FIGS. 10A and 10B; NT: scrambled non-targeting guide). Pre-mature crRNA targeting intron 46 and cargo guide targeting intron 46 were fused from 5′-3′ direction on the cargo template, followed by 31 bp spacer-branch point-poly pyrimidine tract-3′ splicing site (AACGAGGAATTCTCTTCTTTTTTTTCTGCAG (SEQ ID NO: 610)), and Gluc 77-185aa coding sequence (with a single nucleotide difference from the target transcript).

[0273] It was observed that this approach enables up to 150-fold trans splicing protein activation.

### Example 9. 3′ Trans-Splicing Activity on a 5′-Fragment of Gluc Pre-mRNA Target with a Fusion of Cargo Guide and MS2 Hairpin as Well as Cas7-11-MCP Fusion Proteins

[0274] 3′ trans-splicing activity on a 5′-fragment of Gluc pre-mRNA target using a combination of Cas7-11-MCP fusion protein variants and MS2-cargo binding domain-Gluc 77-185aa cargo template variants were assessed (FIGS. 11A and 11B). MS2 hairpin and cargo guide 4 or 6 were fused from 5′-3′ direction on the cargo template, followed by 31 bp spacer-branch point-poly pyrimidine tract-3′ splicing site (AACGAGGAATTCTCTTCTTTTTTTTCTGCAG (SEQ ID NO: 610)), and Gluc 77-185aa coding sequence (with a single nucleotide difference from the target transcript). In a different design, the positions of MS2 hairpin and cargo guide were reversed in the fusion cargo template, followed by the other elements as mentioned above.

[0275] Trans-splicing efficiency was represented by Gluc chemiluminescence signal and normalized to Cluc signal, the latter of which was constantly expressed (FIG. 11C). Gluc/Cluc value for each condition was normalized to that with scrambled cargo template, non-targeting Cas7-11 guide, and NLS-dhuDiCas7-11-MCP-NLS (NT: scrambled non-targeting guide). Additional increases in trans splicing Gluc activation were observed. For example, Cargo 4 went from 42-fold activation to 110-fold activation with the MS2 recruitment. The selection of components was found to be important.

### Example 10. Internal Trans-Splicing Activity on the Gluc Pre-mRNA Target

[0276] Internal trans-splicing activity on the Gluc pre-mRNA target, with 3×STOP codon inserted to the 37-76 aa coding sequenced flanked by intron 46 and intron 48 of COL7A1 in the targeted Glue pre-mRNA were assessed. Successful trans-splicing resulted in an mRNA without cryptic stop codons for the expression of full length Gluc protein.

[0277] The DiCas7-11-assisted internal trans-splicing through target transcript cleavage is shown in FIG. 12A. Trans-splicing efficiency was represented by Gluc chemiluminescence signal and normalized to Cluc signal, the latter of which was constantly expressed, as shown in FIG. 12B. Gluc/Cluc value for each condition was normalized to that with scrambled cargo, non-targeting Cas7-11 guide, and NLS-dhuDiCas7-11-NLS. Trans-splicing efficiency was measured by NGS, probing for the replacement of 3×stop codon from the targeted pre-mRNA transcript to the cargo template as shown in FIG. 12C. Trans-splicing efficiency was normalized to that with scrambled cargo template, non-targeting Cas7-11 guide, and NLS-dhuDiCas7-11-NLS (NT: scrambled non-targeting guide. BP: branch point. PPT: poly pyrimidine tract. SS: splice site).

### Example 11. 3′ Endogenous Trans-Splicing Rate for STAT3 Gene

[0278] The 3′ endogenous trans-splicing rates (%) for the gene STAT3 were assessed using one common cargo replacing STAT3 exon 6 and either a Cas7-11 guide RNA targeting the STAT3 intron 5 or a guide scrambled sequence (FIG. 13). Different truncated versions of the disCas7-11 (plotted on x axis, see FIG. 13) were compared for editing efficiency.

### Materials & Methods

[0279] The constructs were transfected at a 96-well scale on HEK293FT cells in DMEM 10% FBS. For endogenous splicing experiments, transfections were carried out using:
[0280] 10 ng of guide;
[0281] 10 ng of cargo plasmid; and
[0282] 40 ng of Cas7-11 plasmid,
   co-transfected using Lipofectamine 3000.

[0283] RNA was harvested 3 days post-transfection and reverse transcribed using the Thermo RevertAid cDNA prep kit with gene specific reverse transcription primers binding within the inserted or wildtype downstream exons. Two rounds of PCR were run using amplicon primers binding upstream and downstream of the targeted splicing junction and loaded on an Illumina MiSeq for sequencing. Following sequencing, raw reads were analyzed by searching for counts of the wildtype and trans-product splicing junctions and a percentage was calculated.

### Discussion

[0284] Smaller Cas7-11 nucleases are of interest as a lower overall size allows for more options for delivery (e.g., the use of AAV vectors or combinations of constructs). This example demonstrates that smaller, truncated Cas7-11 variants cause a major drop-off in efficiency of trans-splicing, likely due to a loss of catalytic activity.

### Example 12. 3′ Endogenous Trans-Splicing Rate for STAT3 Gene

[0285] The 3′ endogenous trans-splicing rates (%) for the gene STAT3 were assessed using one common cargo replacing STAT3 exon 6 and a set of Cas7-11 or Cas13 guides targeting intron 5 or a scrambled sequence, arrayed around a position that induced efficient splicing for Cas7-11 constructs (FIG. 14). Five different nucleases were compared: the disCas7-11, a catalytically inactive disCas7-11, and 3 major orthologs of Cas13 (Lwa, Psp, and Rfx Cas13).

### Materials & Methods

[0286] The constructs were transfected at a 96-well scale on HEK293FT cells in DMEM 10% FBS. For endogenous splicing experiments, transfections were carried out using:
[0287] 10 ng of guide;
[0288] 10 ng of cargo plasmid; and
[0289] 40 ng of Cas7-11 plasmid,
   co-transfected using Lipofectamine 3000.

[0290] RNA was harvested 3 days post-transfection and reverse transcribed using the Thermo RevertAid cDNA prep kit with gene specific reverse transcription primers binding within the inserted or wildtype downstream exons. Two rounds of PCR were run using amplicon primers binding upstream and downstream of the targeted splicing junction and loaded on an Illumina MiSeq for sequencing. Following sequencing, raw reads were analyzed by searching for counts of the wildtype and trans-product splicing junctions and a percentage was calculated.

### Discussion

[0291] Smaller nucleases are of interest as a lower overall size allows for more options for delivery (e.g., the use of AAV vectors or combinations of constructs). Similarly, orthologous enzymes such as the Cas13s can be useful for the trans-splicing mechanism if they shower higher enzymatic activity. This example shows that Cas13s are inefficient at inducing trans-splicing relative to the Cas7-11 compared here. One potential justification for this is that the Cas13 constructs lack the N- and C-terminal SV40 NLS sequences in the Cas7-11 version, potentially limiting their transit to the nucleus and therefor their ability to bind or target the precursor mRNA.

### Example 13. 3′ Endogenous Trans-Splicing Rate for STAT3 Gene

[0292] The 3′ endogenous trans-splicing rates (%) for the gene STAT3 were assessed using one common cargo replacing STAT3 exon 6 and a set of Cas7-11 or Cas13 guides targeting intron 5 or a scrambled sequence, arrayed around a position that induced efficient splicing for Cas7-11 constructs (FIG. 15). Five different nucleases were compared: the disCas7-11, a catalytically inactive disCas7-11, and 3 major orthologs of Cas13 (Lwa, Psp, and Rfx Cas13).

[0293] The constructs were transfected at a 96-well scale on HEK293FT cells in DMEM 10% FBS.

### Materials & Methods

[0294] For endogenous splicing experiments, transfections were carried out using:
[0295] 10 ng of guide
[0296] 10 ng of cargo plasmid
[0297] 40 ng of Cas7-11 plasmid
   co-transfected using Lipofectamine 3000.

[0298] RNA was harvested 3 days post-transfection and reverse transcribed using the Thermo RevertAid cDNA prep kit with gene specific reverse transcription primers binding within the inserted or wildtype downstream exons. Two rounds of PCR were run using amplicon primers binding upstream and downstream of the targeted splicing junction and loaded on an Illumina MiSeq for sequencing. Following sequencing, raw reads were analyzed by searching for counts of the wildtype and trans-product splicing junctions and a percentage was calculated.

### Discussion

[0299] Smaller nucleases are of interest as a lower overall size allows for more options for delivery (e.g., the use of AAV vectors or combinations of constructs). Similarly, orthologous enzymes such as the Cas13s can be useful for the trans-splicing mechanism. This example shows that Cas13s are inefficient at inducing trans-splicing relative to the Cas7-11. Cas13s, in this example, are expressed with N- and C-terminal SV40 NLS sequences.

### Example 14. 3′ Endogenous Trans-Splicing Rate for PABPC1 Gene

[0300] 3′ endogenous trans-splicing rates (%) for the gene PABPC1 were assessed using one common cargo replacing the PABPC1 terminal exon 14 and either a PABPC1 intron 13 or scrambled guide (FIG. 16). The wildtype disCas7-11 nuclease was compared against constructs with a direct (no intervening linker) or indirect (XTEN linker intervening) fusion to various splicing proteins (RAMB17, SF3B6, U2AF1, or U2AF2) at their N- or C-terminals.

### Materials & Methods

[0301] The constructs were transfected at a 96-well scale on HEK293FT cells in DMEM 10% FBS. For endogenous splicing experiments, transfections were carried out using:
[0302] 10 ng of guide;
[0303] 10 ng of cargo plasmid; and
[0304] 40 ng of Cas7-11 plasmid,
   co-transfected using Lipofectamine 3000.

[0305] RNA was harvested 3 days post-transfection and reverse transcribed using the Thermo RevertAid cDNA prep kit with gene specific reverse transcription primers binding within the inserted or wildtype downstream exons. Two rounds of PCR were run using amplicon primers binding upstream and downstream of the targeted splicing junction and loaded on an Illumina MiSeq for sequencing. Following sequencing, raw reads were analyzed by searching for counts of the wildtype and trans-product splicing junctions and a percentage was calculated.

### Discussion

[0306] Fusions of splicing related proteins, such as the various members of the spliceosome, to the Cas7-11 effector can provide an orthogonal (not cleavage dependent) mechanism for increasing trans-splicing rates. This fusion approach is analogous to how CRISPR-based technologies such as Prime editing or CRISPR activation gain efficiency through recruitment or delivery of relevant factors with the major effector.

[0307] Nearly all fusions of spliceosome proteins tested show an increased splicing rate relative to the Cas7-11 only construct. In combination with the other genes tested using the same set of constructs, certain genes structures or intron sizes can benefit to greater degrees from recruitment of different splicing proteins, potentially indicating a different spliceosome composition or mechanism.

### Example 15. 3′ Endogenous Trans-Splicing Rate for STAT3 Gene

[0308] The 3′ endogenous trans-splicing rates (%) for the gene STAT3 were assessed using one common cargo replacing the STAT3 exon 6 and either a STAT3 intron 5 or scrambled guide (FIG. 17). The wildtype disCas7-11 nuclease was compared against constructs with a direct (no intervening linker) or indirect (XTEN linker intervening) fusion to various splicing proteins (RMB17, SF3B6, U2AF1, or U2AF2) at their N- or C-terminals.

### Materials & Methods

[0309] The constructs were transfected at a 96-well scale on HEK293FT cells in DMEM 10% FBS. For endogenous splicing experiments, transfections were carried out using:
[0310] 10 ng of guide;
[0311] 10 ng of cargo plasmid; and
[0312] 40 ng of Cas7-11 plasmid,
   co-transfected using Lipofectamine 3000.

[0313] RNA was harvested 3 days post-transfection and reverse transcribed using the Thermo RevertAid cDNA prep kit with gene specific reverse transcription primers binding within the inserted or wildtype downstream exons. Two rounds of PCR were run using amplicon primers binding upstream and downstream of the targeted splicing junction and loaded on an Illumina MiSeq for sequencing. Following sequencing, raw reads were analyzed by searching for counts of the wildtype and trans-product splicing junctions and a percentage was calculated.

### Discussion

[0314] Fusions of splicing related proteins, such as the various members of the spliceosome, to the Cas7-11 effector can provide an orthogonal (not cleavage dependent) mechanism for increasing trans-splicing rates. This fusion approach is analogous to how CRISPR-based technologies such as Prime editing or CRISPR activation gain efficiency through recruitment or delivery of relevant factors with the major effector.

[0315] Several fusions of spliceosome proteins tested show an increased splicing rate relative to the Cas7-11 only construct. In combination with the other genes tested using the same set of constructs, certain genes structures or intron sizes can benefit to greater degrees from recruitment of different splicing proteins, potentially indicating a different spliceosome composition or mechanism.

### Example 16. 3′ Endogenous Trans-Splicing Rate for PPIB Gene

[0316] The 3′ endogenous trans-splicing rates (%) for the gene PPIB were assessed using one common cargo replacing the PPIB terminal exon and either a PPIB intron 4 or scrambled guide (FIG. 18). The wildtype disCas7-11 nuclease was compared against constructs with a direct (no intervening linker) or indirect (XTEN linker intervening) fusion to various splicing proteins (RMB17, SF3B6, U2AF1, or U2AF2) at their N- or C-terminals.

### Materials & Methods

[0317] The constructs were transfected at a 96-well scale on HEK293FT cells in DMEM 10% FBS. For endogenous splicing experiments, transfections were carried out using:
[0318] 10 ng of guide;
[0319] 10 ng of cargo plasmid; and
[0320] 40 ng of Cas7-11 plasmid,
   co-transfected using Lipofectamine 3000.

[0321] RNA was harvested 3 days post-transfection and reverse transcribed using the Thermo RevertAid cDNA prep kit with gene specific reverse transcription primers binding within the inserted or wildtype downstream exons. Two rounds of PCR were run using amplicon primers binding upstream and downstream of the targeted splicing junction and loaded on an Illumina MiSeq for sequencing. Following sequencing, raw reads were analyzed by searching for counts of the wildtype and trans-product splicing junctions and a percentage was calculated.

### Discussion

[0322] Fusions of splicing related proteins, such as the various members of the spliceosome, to the Cas7-11 effector can provide an orthogonal (not cleavage dependent) mechanism for increasing trans-splicing rates. This fusion approach is analogous to how CRISPR-based technologies such as Prime editing or CRISPR activation gain efficiency through recruitment or delivery of relevant factors with the major effector.

[0323] Several fusions of spliceosome proteins tested increase trans-splicing rates relative to the wildtype Cas7-11. In combination with the other genes tested using the same set of constructs, certain genes structures or intron sizes can benefit to greater degrees from recruitment of different splicing proteins, potentially indicating a different spliceosome composition or mechanism.

### Example 17. 3′ Endogenous Trans-Splicing Rate for TOP2A Gene

[0324] The 3′ endogenous trans-splicing rates (%) for the gene TOP2A were assessed using one common cargo replacing the TOP2A exon 21 and either a TOP2A intron 20 or scrambled guide (FIG. 19). The wildtype disCas7-11 nuclease was compared against constructs with a direct (no intervening linker) or indirect (XTEN linker intervening) fusion to various splicing proteins (RMB17, SF3B6, U2AF1, or U2AF2) at their N- or C-terminals.

### Materials & Methods

[0325] The constructs were transfected at a 96-well scale on HEK293FT cells in DMEM 10% FBS. For endogenous splicing experiments, transfections were carried out using:
[0326] 10 ng of guide;
[0327] 10 ng of cargo plasmid; and
[0328] 40 ng of Cas7-11 plasmid,
   co-transfected using Lipofectamine 3000.

[0329] RNA was harvested 3 days post-transfection and reverse transcribed using the Thermo RevertAid cDNA prep kit with gene specific reverse transcription primers binding within the inserted or wildtype downstream exons. Two rounds of PCR were run using amplicon primers binding upstream and downstream of the targeted splicing junction and loaded on an Illumina MiSeq for sequencing. Following sequencing, raw reads were analyzed by searching for counts of the wildtype and trans-product splicing junctions and a percentage was calculated.

### Discussion

[0330] Fusions of splicing related proteins, such as the various members of the spliceosome, to the Cas7-11 effector can provide an orthogonal (not cleavage dependent) mechanism for increasing trans-splicing rates. This fusion approach is analogous to how CRISPR-based technologies such as Prime editing or CRISPR activation gain efficiency through recruitment or delivery of relevant factors with the major effector.

[0331] Several fusions of spliceosome proteins tested increase trans-splicing rates relative to the wildtype Cas7-11, while others perform similarly or worse. In combination with the other genes tested using the same set of constructs, certain genes structures or intron sizes can benefit to greater degrees from recruitment of different splicing proteins, potentially indicating a different spliceosome composition or mechanism.

### Example 18. 3′ Endogenous Trans-Splicing Rate for PPIB Gene

[0332] The 3′ endogenous trans-splicing rates (%) for the gene PPIB were assessed using one common cargo replacing the PPIB terminal exon and either a PPIB intron 4 or scrambled guide (FIG. 20). The wildtype disCas7-11 nuclease was compared against constructs with a direct (no intervening linker) or indirect (XTEN linker intervening) fusion to various splicing proteins (RMB17, SF3B6, U2AF1, or U2AF2) at their N- or C-terminals. Constructs with GS linkers replacing the XTENs were also considered.

### Materials & Methods

[0333] The constructs were transfected at a 96-well scale on HEK293FT cells in DMEM 10% FBS. For endogenous splicing experiments, transfections were carried out using:
[0334] 10 ng of guide;
[0335] 10 ng of cargo plasmid; and
[0336] 40 ng of Cas7-11 plasmid,
   co-transfected using Lipofectamine 3000.

[0337] RNA was harvested 3 days post-transfection and reverse transcribed using the Thermo RevertAid cDNA prep kit with gene specific reverse transcription primers binding within the inserted or wildtype downstream exons. Two rounds of PCR were run using amplicon primers binding upstream and downstream of the targeted splicing junction and loaded on an Illumina MiSeq for sequencing. Following sequencing, raw reads were analyzed by searching for counts of the wildtype and trans-product splicing junctions and a percentage was calculated.

### Discussion

[0338] Fusions of splicing related proteins, such as the various members of the spliceosome, to the Cas7-11 effector can provide an orthogonal (not cleavage dependent) mechanism for increasing trans-splicing rates. This fusion approach is analogous to how CRISPR-based technologies such as Prime editing or CRISPR activation gain efficiency through recruitment or delivery of relevant factors with the major effector.

[0339] Several fusions of spliceosome proteins tested increase trans-splicing rates relative to the wildtype Cas7-11. In combination with the other genes tested using the same set of constructs, certain genes structures or intron sizes can benefit to greater degrees from recruitment of different splicing proteins, potentially indicating a different spliceosome composition or mechanism.

### Example 19. 3′ Endogenous Trans-Splicing Rate for STAT3 Gene

[0340] The 3′ endogenous trans-splicing rates (%) for the gene STAT3 were assessed using one common cargo replacing the STAT3 exon 6 and either a STAT3 intron 5 or scrambled guide (FIG. 21). The wildtype disCas7-11 nuclease was compared against constructs with a direct (no intervening linker) or indirect (XTEN linker intervening) fusion to various splicing proteins (RMB17, SF3B6, U2AF1, or U2AF2) at their N- or C-terminals. Constructs with GS linkers replacing the XTENs were also considered.

### Materials & Methods

[0341] The constructs were transfected at a 96-well scale on HEK293FT cells in DMEM 10% FBS. For endogenous splicing experiments, transfections were carried out using:
[0342] 10 ng of guide
[0343] 10 ng of cargo plasmid
[0344] 40 ng of Cas7-11 plasmid
   co-transfected using Lipofectamine 3000.

[0345] RNA was harvested 3 days post-transfection and reverse transcribed using the Thermo RevertAid cDNA prep kit with gene specific reverse transcription primers binding within the inserted or wildtype downstream exons. Two rounds of PCR were run using amplicon primers binding upstream and downstream of the targeted splicing junction and loaded on an Illumina MiSeq for sequencing. Following sequencing, raw reads were analyzed by searching for counts of the wildtype and trans-product splicing junctions and a percentage was calculated.

### Discussion

[0346] Fusions of splicing related proteins, such as the various members of the spliceosome, to the Cas7-11 effector can provide an orthogonal (not cleavage dependent) mechanism for increasing trans-splicing rates. This fusion approach is analogous to how CRISPR-based technologies such as Prime editing or CRISPR activation gain efficiency through recruitment or delivery of relevant factors with the major effector.

[0347] Several fusions of spliceosome proteins tested show an increased splicing rate relative to the Cas7-11 only construct. In combination with the other genes tested using the same set of constructs, certain genes structures or intron sizes can benefit to greater degrees from recruitment of different splicing proteins, potentially indicating a different spliceosome composition or mechanism.

### Example 20. 3′ Endogenous Trans-Splicing Rate for TOP2A Gene

[0348] The 3′ endogenous trans-splicing rates (%) for the gene TOP2A were assessed using one common cargo replacing the TOP2A exon 21 and either a TOP2A intron 20 or scrambled guide (FIG. 22). The wildtype disCas7-11 nuclease was compared against constructs with a direct (no intervening linker) or indirect (XTEN linker intervening) fusion to various splicing proteins (RMB17, SF3B6, U2AF1, or U2AF2) at their N- or C-terminals. Constructs with GS linkers replacing the XTENs were also considered.

### Materials & Methods

[0349] The constructs were transfected at a 96-well scale on HEK293FT cells in DMEM 10% FBS. For endogenous splicing experiments, transfections were carried out using:
[0350] 10 ng of guide;
[0351] 10 ng of cargo plasmid; and
[0352] 40 ng of Cas7-11 plasmid,
   co-transfected using Lipofectamine 3000.

[0353] RNA was harvested 3 days post-transfection and reverse transcribed using the Thermo RevertAid cDNA prep kit with gene specific reverse transcription primers binding within the inserted or wildtype downstream exons. Two rounds of PCR were run using amplicon primers binding upstream and downstream of the targeted splicing junction and loaded on an Illumina MiSeq for sequencing. Following sequencing, raw reads were analyzed by searching for counts of the wildtype and trans-product splicing junctions and a percentage was calculated.

### Discussion

[0354] Fusions of splicing related proteins, such as the various members of the spliceosome, to the Cas7-11 effector can provide an orthogonal (not cleavage dependent) mechanism for increasing trans-splicing rates. This fusion approach is analogous to how CRISPR-based technologies such as Prime editing or CRISPR activation gain efficiency through recruitment or delivery of relevant factors with the major effector.

[0355] Several fusions of spliceosome proteins tested increase trans-splicing rates relative to the wildtype Cas7-11, while others perform similarly or worse. In combination with the other genes tested using the same set of constructs, certain genes structures or intron sizes can benefit to greater degrees from recruitment of different splicing proteins, potentially indicating a different spliceosome composition or mechanism.

### Example 21. 3′ Endogenous Trans-Splicing Rate %) for SHANK3 Gene

[0356] The 3′ endogenous trans-splicing rates (%) for the gene SHANK3 were assessed using one common cargo replacing the SHANK3 exon 21 and either a SHANK3 intron 20 or scrambled guide (FIG. 23). The wildtype disCas7-11 nuclease was compared against constructs with a direct (no intervening linker) or indirect (XTEN linker intervening) fusion to various splicing proteins (RMB17, SF3B6, U2AF1, or U2AF2) at their N- or C-terminals, as well as constructs generated through rounds of mutagenesis of disCas7-11 that show higher catalytic activity.

### Materials & Methods

[0357] The constructs were transfected at a 96-well scale on HEK293FT cells in DMEM 10% FBS. For endogenous splicing experiments, transfections were carried out using:
[0358] 10 ng of guide;
[0359] 10 ng of cargo plasmid; and
[0360] 40 ng of Cas7-11 plasmid,
   co-transfected using Lipofectamine 3000.

[0361] RNA was harvested 3 days post-transfection and reverse transcribed using the Thermo RevertAid cDNA prep kit with gene specific reverse transcription primers binding within the inserted or wildtype downstream exons. Two rounds of PCR were run using amplicon primers binding upstream and downstream of the targeted splicing junction and loaded on an Illumina MiSeq for sequencing. Following sequencing, raw reads were analyzed by searching for counts of the wildtype and trans-product splicing junctions and a percentage was calculated.

### Discussion

[0362] Fusions of splicing related proteins, such as the various members of the spliceosome, to the Cas7-11 effector can provide an orthogonal (not cleavage dependent) mechanism for increasing trans-splicing rates. This fusion approach is analogous to how CRISPR-based technologies such as Prime editing or CRISPR activation gain efficiency through recruitment or delivery of relevant factors with the major effector.

[0363] Several fusions of spliceosome proteins tested increase trans-splicing rates relative to the wildtype Cas7-11. Similarly, improvements to catalytic activity of the disCas7-11 improve overall trans-splicing rates, suggesting that intron cleavage is a rate-limiting factor for trans-splicing.

### Example 22. 3′ Endogenous Trans-Splicing Rate for SHANK3 Gene

[0364] The 3′ endogenous trans-splicing rates (%) for the gene SHANK3 were assessed using one common cargo replacing the SHANK3 exon 21 and either a SHANK3 intron 20 or scrambled guide (FIG. 24). Different truncated versions of the disCas7-11 (plotted on x axis, see FIG. 24) were compared for editing efficiency. Mutations that confer higher catalytic activity for the full-length disCas7-11 were onto the best-performing truncated Cas7-11 (1006-GGGS-1221).

### Materials & Methods

[0365] The constructs were transfected at a 96-well scale on HEK293FT cells in DMEM 10% FBS. For endogenous splicing experiments, transfections were carried out using:
[0366] 10 ng of guide;
[0367] 10 ng of cargo plasmid; and
[0368] 40 ng of Cas7-11 plasmid,
   co-transfected using Lipofectamine 3000.

[0369] RNA was harvested 3 days post-transfection and reverse transcribed using the Thermo RevertAid cDNA prep kit with gene specific reverse transcription primers binding within the inserted or wildtype downstream exons. Two rounds of PCR were run using amplicon primers binding upstream and downstream of the targeted splicing junction and loaded on an Illumina MiSeq for sequencing. Following sequencing, raw reads were analyzed by searching for counts of the wildtype and trans-product splicing junctions and a percentage was calculated.

### Discussion

[0370] Smaller Cas7-11 nucleases are of interest as a lower overall size allows for more options for delivery (e.g., the use of AAV vectors or combinations of constructs). While wildtype truncated Cas7-11S performs less relative to the full-length construct, mutagenesis of the small Cas7-11 recovers some of the catalytic efficiency, potentially allowing for a smaller overall effector for trans-splicing applications requiring it.

### Example 23. 5′ Endogenous Trans-Splicing Rate for HTT Gene

[0371] The 5′ endogenous trans-splicing rates (%) for the gene HTT were assessed using one common cargo replacing HTT exon 1 and either a HTT intron 1 or scrambled guide (FIG. 25). The wildtype disCas7-11 nuclease was compared against constructs with a direct (no intervening linker) or indirect (XTEN linker intervening) fusion to various splicing proteins (RMB17, SF3B6, U2AF1, or U2AF2) at their N- or C-terminals, as well as constructs generated through rounds of mutagenesis of disCas7-11 that show higher catalytic activity.

### Materials & Methods

[0372] The constructs were transfected at a 96-well scale on HEK293FT cells in DMEM 10% FBS. For endogenous splicing experiments, transfections were carried out using:
[0373] 10 ng of guide;
[0374] 10 ng of cargo plasmid; and
[0375] 40 ng of Cas7-11 plasmid,
   co-transfected using Lipofectamine 3000.

[0376] RNA was harvested 3 days post-transfection and reverse transcribed using the Thermo RevertAid cDNA prep kit with gene specific reverse transcription primers binding within the inserted or wildtype downstream exons. Two rounds of PCR were run using amplicon primers binding upstream and downstream of the targeted splicing junction and loaded on an Illumina MiSeq for sequencing. Following sequencing, raw reads were analyzed by searching for counts of the wildtype and trans-product splicing junctions and a percentage was calculated.

### Discussion

[0377] Fusions of splicing related proteins, such as the various members of the spliceosome, to the Cas7-11 effector can provide an orthogonal (not cleavage dependent) mechanism for increasing trans-splicing rates. This fusion approach is analogous to how CRISPR-based technologies such as Prime editing or CRISPR activation gain efficiency through recruitment or delivery of relevant factors with the major effector.

[0378] Several fusions of spliceosome proteins tested increase trans-splicing rates relative to the wildtype Cas7-11. Similarly, improvements to catalytic activity of the disCas7-11 improve overall trans-splicing rates, suggesting that intron cleavage is a rate-limiting factor for trans-splicing.

### Example 24. 3′ Endogenous Trans-Splicing Rate for STAT3 and PPIB Genes

[0379] The 3′ endogenous trans-splicing rates (%) for the gene STAT3 were assessed using one common cargo replacing STAT3 exon 6 and a targeting or nontargeting guide for STAT3 intron 5 (FIG. 26). The 3′ endogenous trans-splicing rate (%) for PPIB terminal exon 14 was also assessed similarly with a guide targeting intron 4 or a scrambled sequence. As shown on FIG. 26, trans-splicing efficiency was plotted as a timeline, with timepoints every 12 hours across 3 days.

### Materials & Methods

[0380] The constructs were transfected at a 96-well scale on HEK293FT cells in DMEM 10% FBS. For endogenous splicing experiments, transfections were carried out using:
[0381] 10 ng of guide;
[0382] 10 ng of cargo plasmid; and
[0383] 40 ng of Cas7-11 plasmid,
   co-transfected using Lipofectamine 3000.

[0384] RNA was harvested 3 days post-transfection and reverse transcribed using the Thermo RevertAid cDNA prep kit with gene specific reverse transcription primers binding within the inserted or wildtype downstream exons. Two rounds of PCR were run using amplicon primers binding upstream and downstream of the targeted splicing junction and loaded on an Illumina MiSeq for sequencing. Following sequencing, raw reads were analyzed by searching for counts of the wildtype and trans-product splicing junctions and a percentage was calculated.

### Discussion

[0385] Trans-splicing kinetics were measured by assaying replacement rate over time, starting with 12 hours post-transfection. This example indicates that rates increase rapidly within the first 48 hours of introduction of the Cas7-11, guide, and cargo, and then likely plateau after −3 days post transfection. This example further suggests that there is a delay before trans-splicing can occur efficiency, likely corresponding to the timing of translation of the nuclease, and that the majority of the rate is attained within 72 hours of transfection, which can be relevant for certain dosing applications.

### Example 25. 3′ Endogenous Trans-Splicing Rate for STAT3 Gene

[0386] The 3′ endogenous trans-splicing rates (%) for the gene STAT3 were assessed using one common cargo structure replacing STAT3 exon 6 and a targeting or nontargeting guide for STAT3 intron 5 (FIG. 27). Variations of the inserted sequence were compared by inducing mutations to generate each possible single base conversion (e.g., A→G, C, or T).

### Materials & Methods

[0387] The constructs were transfected at a 96-well scale on HEK293FT cells in DMEM 10% FBS. For endogenous splicing experiments, transfections were carried out using:
[0388] 10 ng of guide;
[0389] 10 ng of cargo plasmid; and
[0390] 40 ng of Cas7-11 plasmid,
   co-transfected using Lipofectamine 3000.

[0391] RNA was harvested 3 days post-transfection and reverse transcribed using the Thermo RevertAid cDNA prep kit with gene specific reverse transcription primers binding within the inserted or wildtype downstream exons. Two rounds of PCR were run using amplicon primers binding upstream and downstream of the targeted splicing junction and loaded on an Illumina MiSeq for sequencing. Following sequencing, raw reads were analyzed by searching for counts of the wildtype and trans-product splicing junctions and a percentage was calculated.

### Discussion

[0392] This example aims to demonstrate that cargo insertion rates are largely independent of the actual cargo structure. Sequence variation within the exon inserted in trans has only a minimal effect on splicing rates, with the exception of the conversions of G→A, C, or T. This difference is likely due to changing the first nucleotide of the inserted exon, which is known to be a part of the -NNGTNNN- splice acceptor motif found at the start of nearly all mammalian exons. This example shows that a variety of cargos can be inserted (allowing for applications such as the correction of mutations), but that the initial splice acceptor “GT” should be conserved as it participates in the splicing reaction.

### Example 26. 3′ Endogenous Trans-Splicing Rate for STAT3 Gene

[0393] The 3′ endogenous trans-splicing rates (%) for the gene STAT3 were assessed using one common cargo structure replacing STAT3 exon 6 and a targeting or nontargeting guide for STAT3 intron 5 (FIG. 28). Variations of the inserted sequence were compared by inducing mutations to change bases of the inserted exon either 1, 2, or 3 residues at a time.

### Materials & Methods

[0394] The constructs were transfected at a 96-well scale on HEK293FT cells in DMEM 10% FBS. For endogenous splicing experiments, transfections were carried out using:
[0395] 10 ng of guide;
[0396] 10 ng of cargo plasmid; and
[0397] 40 ng of Cas7-11 plasmid,
   co-transfected using Lipofectamine 3000.

[0398] RNA was harvested 3 days post-transfection and reverse transcribed using the Thermo RevertAid cDNA prep kit with gene specific reverse transcription primers binding within the inserted or wildtype downstream exons. Two rounds of PCR were run using amplicon primers binding upstream and downstream of the targeted splicing junction and loaded on an Illumina MiSeq for sequencing. Following sequencing, raw reads were analyzed by searching for counts of the wildtype and trans-product splicing junctions and a percentage was calculated.

### Discussion

[0399] This example aims to demonstrate that cargo insertion rates are largely independent of the actual cargo structure. Sequence variation within the exon inserted in trans has only a minimal effect on splicing rates, indicating that trans-splicing can generate single or multiple residue changes to the inserted cargos (relevant to applications for correcting disease mutations or inducing a desired minor change). The apparent small reduction in splicing rate with 2 or 3 residue changes may be due to a marginal increase in the amplicon length for these cargos, as primers read across the inserted region.

### Example 27. 3′ Endogenous Trans-Splicing Rate for STAT3 Gene

[0400] The 3′ endogenous trans-splicing rates (%) for the gene STAT3 were assessed using one common cargo structure replacing STAT3 exon 6 and a targeting or nontargeting guide for STAT3 intron 5 (FIG. 29). Variations of the inserted sequence were compared by inducing mutations to generate each possible single base conversion (e.g., A→G, C, or T).

### Materials & Methods

[0401] The constructs were transfected at a 96-well scale on HEK293FT cells in DMEM 10% FBS. For endogenous splicing experiments, transfections were carried out using:
[0402] 10 ng of guide;
[0403] 10 ng of cargo plasmid; and
[0404] 40 ng of Cas7-11 plasmid,
   co-transfected using Lipofectamine 3000.

[0405] RNA was harvested 3 days post-transfection and reverse transcribed using the Thermo RevertAid cDNA prep kit with gene specific reverse transcription primers binding within the inserted or wildtype downstream exons. Two rounds of PCR were run using amplicon primers binding upstream and downstream of the targeted splicing junction and loaded on an Illumina MiSeq for sequencing. Following sequencing, raw reads were analyzed by searching for counts of the wildtype and trans-product splicing junctions and a percentage was calculated.

### Discussion

[0406] This example aims to demonstrate that cargo insertion rates are largely independent of the actual cargo structure. Sequence variation within the exon inserted in trans has only a minimal effect on splicing rates. This experiment constructs with the initial comparison in that the G-base conversions are not on the first G within the exon, which is known to be a part of the -NNGTNNN-splice acceptor motif found at the start of nearly all mammalian exons, confirming that non-first Gs can be replaced without negatively affecting splicing rates. This example shows that a variety of cargos can be inserted (allowing for applications such as the correction of mutations).

### Example 28. 3′ Endogenous Trans-Splicing Rate for PPIB Gene

[0407] The 3′ endogenous trans-splicing rates (%) for the gene PPIB were assessed using one common cargo replacing the PPIB terminal exon and either a PPIB intron 4 or scrambled guide (FIG. 30). Variations of the inserted sequence were compared by inducing mutations to generate each possible single base conversion (e.g., A→G, C, or T).

### Materials & Methods

[0408] The constructs were transfected at a 96-well scale on HEK293FT cells in DMEM 10% FBS. For endogenous splicing experiments, transfections were carried out using:
[0409] 10 ng of guide;
[0410] 10 ng of cargo plasmid; and
[0411] 40 ng of Cas7-11 plasmid,
   co-transfected using Lipofectamine 3000.

[0412] RNA was harvested 3 days post-transfection and reverse transcribed using the Thermo RevertAid cDNA prep kit with gene specific reverse transcription primers binding within the inserted or wildtype downstream exons. Two rounds of PCR were run using amplicon primers binding upstream and downstream of the targeted splicing junction and loaded on an Illumina MiSeq for sequencing. Following sequencing, raw reads were analyzed by searching for counts of the wildtype and trans-product splicing junctions and a percentage was calculated.

### Discussion

[0413] This example aims to demonstrate that cargo insertion rates are largely independent of the actual cargo structure. Sequence variation within the exon inserted in trans has only a minimal effect on splicing rates. This experiment shows that a variety of cargos can be inserted (allowing for applications such as the correction of mutations) for a second target.

[0414] Unlike the STAT3 target, PPIB splicing rates are less affected by replacement of the first G (from the -NNNAGNNN-) splice acceptor motif.

[0415] This data supports the STAT3 insertion data, suggesting that the observed behaviour is generalizable to multiple endogenous targets.

### Example 29. 3′ Endogenous Trans-Splicing Rate for PPIB Gene

[0416] The 3′ endogenous trans-splicing rates (%) for the gene PPIB were assessed using one common cargo replacing the PPIB terminal exon and either a PPIB intron 4 or scrambled guide (FIG. 31). Variations of the inserted sequence were compared by inducing mutations to change bases of the inserted exon either 1, 2, or 3 residues at a time.

### Materials & Methods

[0417] The constructs were transfected at a 96-well scale on HEK293FT cells in DMEM 10% FBS. For endogenous splicing experiments, transfections were carried out using:
[0418] 10 ng of guide;
[0419] 10 ng of cargo plasmid; and
[0420] 40 ng of Cas7-11 plasmid,
   co-transfected using Lipofectamine 3000.

[0421] RNA was harvested 3 days post-transfection and reverse transcribed using the Thermo RevertAid cDNA prep kit with gene specific reverse transcription primers binding within the inserted or wildtype downstream exons. Two rounds of PCR were run using amplicon primers binding upstream and downstream of the targeted splicing junction and loaded on an Illumina MiSeq for sequencing. Following sequencing, raw reads were analyzed by searching for counts of the wildtype and trans-product splicing junctions and a percentage was calculated.

### Discussion

[0422] This example aims to demonstrate that cargo insertion rates are largely independent of the actual cargo structure. Sequence variation within the exon inserted in trans has only a minimal effect on splicing rates, indicating that trans-splicing can generate single or multiple residue changes to the inserted cargos (relevant to applications for correcting disease mutations or inducing a desired minor change).

[0423] This data supports the STAT3 insertion data, suggesting that the observed behaviour is generalizable to multiple endogenous targets.

### Example 30. 3′ Endogenous Trans-Splicing Rate for PPIB Gene

[0424] The 3′ endogenous trans-splicing rates (%) for the gene PPIB were assessed using one common cargo replacing the PPIB terminal exon and either a PPIB intron 4 or scrambled guide (FIG. 32). Variations of the inserted sequence were generated with insertions of the sizes reported across the x axis (from 1-96 bp, see FIG. 32) as well as deletions from 6-24 bp.

### Materials & Methods

[0425] The constructs were transfected at a 96-well scale on HEK293FT cells in DMEM 10% FBS. For endogenous splicing experiments, transfections were carried out using:
[0426] 10 ng of guide;
[0427] 10 ng of cargo plasmid; and
[0428] 40 ng of Cas7-11 plasmid,
   co-transfected using Lipofectamine 3000.

[0429] RNA was harvested 3 days post-transfection and reverse transcribed using the Thermo RevertAid cDNA prep kit with gene specific reverse transcription primers binding within the inserted or wildtype downstream exons. Two rounds of PCR were run using amplicon primers binding upstream and downstream of the targeted splicing junction and loaded on an Illumina MiSeq for sequencing. Following sequencing, raw reads were analyzed by searching for counts of the wildtype and trans-product splicing junctions and a percentage was calculated.

### Discussion

[0430] This example aims to demonstrate that cargo insertion rates are largely independent of the actual cargo structure. Sequence variation within the exon inserted in trans has only a minimal effect on splicing rates, indicating that trans-splicing can generate single or multiple residue changes to the inserted cargos (relevant to applications for correcting disease mutations or inducing a desired minor change).

[0431] The apparent small reduction in splicing rate with increasingly large insertions, and conversely the increase with deletions, can be due to an increase in the amplicon length for these cargos, as primers read across the inserted region and therefore can be biased against in the readout. However, this example shows that large structural changed can be made to the cargos without impairing the overall ability to splice.

### Example 31. 3′ Endogenous Trans-Splicing Rate for PPIB (PP), USF1 (U), STAT3 (S), PABPC1 (PA), and TOP2A(T) Genes

[0432] The 3′ endogenous trans-splicing rates (%) for the genes PPIB (PP), USF1 (U), STAT3 (S), PABPC1 (PA), and TOP2A(T) edited simultaneously within the same conditions were assessed (FIG. 33A and FIG. 33B). The heat maps from FIG. 33A and FIG. 33B show splicing rate (0-25%) per target (across the X axis) for each of the combinations (shown on the y axis).

### Materials & Methods

[0433] The constructs were transfected at a 96-well scale on HEK293FT cells in DMEM 10% FBS. For endogenous splicing experiments, transfections were carried out using:
[0434] 10 ng of guide;
[0435] 10 ng of cargo plasmid; and
[0436] 40 ng of Cas7-11 plasmid,
   co-transfected using Lipofectamine 3000.

[0437] For this example, 10 ng of guide and cargo were used per gene assayed in each condition—therefore, total DNA amounts vary relative to the constant amount of nuclease transfected.

[0438] RNA was harvested 3 days post-transfection and reverse transcribed using the Thermo RevertAid cDNA prep kit with gene specific reverse transcription primers binding within the inserted or wildtype downstream exons. Two rounds of PCR were run using amplicon primers binding upstream and downstream of the targeted splicing junction and loaded on an Illumina MiSeq for sequencing. Following sequencing, raw reads were analyzed by searching for counts of the wildtype and trans-product splicing junctions and a percentage was calculated.

### Discussion

[0439] These results demonstrate that trans-splicing is multiplex-able—in the sense that multiple endogenous transcripts can be edited with relatively stable efficiency concurrently. Applications for this type of multiplexing (several cargos into several targets, vs several cargos into a single target) can be the tagging of genes concurrently, or replacement of multiple therapeutically relevant genes, or barcoding of specific transcripts for visualization of sequencing purposes.

### Example 32. 3′ Endogenous Trans-Splicing Rate for STAT3 Gene

[0440] The 3′ endogenous trans-splicing rates (%) for the gene STAT3 were assessed using one common cargo structure replacing STAT3 exon 6 and a targeting or nontargeting guide for STAT3 intron 5 (FIG. 34). In FIG. 34, the original cargo is shown furthest to the right, with cargos to the left of it having increasingly large sizes (up to insertion of the entire STAT3 transcript).

### Materials & Methods

[0441] The constructs were transfected at a 96-well scale on HEK293FT cells in DMEM 10% FBS. For endogenous splicing experiments, transfections were carried out using:
[0442] 10 ng of guide;
[0443] 10 ng of cargo plasmid; and
[0444] 40 ng of Cas7-11 plasmid,
   co-transfected using Lipofectamine 3000.

[0445] RNA was harvested 3 days post-transfection and reverse transcribed using the Thermo RevertAid cDNA prep kit with gene specific reverse transcription primers binding within the inserted or wildtype downstream exons. Two rounds of PCR were run using amplicon primers binding upstream and downstream of the targeted splicing junction and loaded on an Illumina MiSeq for sequencing. Following sequencing, raw reads were analyzed by searching for counts of the wildtype and trans-product splicing junctions and a percentage was calculated.

### Discussion

[0446] This example aims to demonstrate that cargo insertion rates are largely independent of the actual cargo structure or size. It shows that cargos ranging from 80 bp to almost 2 kb can be inserted at the STAT3 locus with comparable efficiency (especially for cargos between 463 bp and 1863 bp, for which there is limited, if any, reduction in rates). This suggests that splicing efficiency likely has little to do with the structure of the cargo and indicates that it can be possible to insert large sequences using this trans-splicing strategy.

### Example 33. 3′ Endogenous Trans-Splicing Rate for PPIB Gene

[0447] The 3′ endogenous trans-splicing rates (%) for the gene PPIB were assessed using one common cargo replacing the PPIB terminal exon and either a PPIB intron 4 or scrambled guide (FIG. 35). Truncations of the hybridization region were tested for impact on overall splicing rate at PPIB. Truncations tested include 50 bp reductions of the original cargo from the 5′ and 3′ ends (totaling 100 bp), or 50 bp from each side.

### Materials & Methods

[0448] The constructs were transfected at a 96-well scale on HEK293FT cells in DMEM 10% FBS. For endogenous splicing experiments, transfections were carried out using:
[0449] 10 ng of guide;
[0450] 10 ng of cargo plasmid; and
[0451] 40 ng of Cas7-11 plasmid,
   co-transfected using Lipofectamine 3000.

[0452] RNA was harvested 3 days post-transfection and reverse transcribed using the Thermo RevertAid cDNA prep kit with gene specific reverse transcription primers binding within the inserted or wildtype downstream exons. Two rounds of PCR were run using amplicon primers binding upstream and downstream of the targeted splicing junction and loaded on an Illumina MiSeq for sequencing. Following sequencing, raw reads were analyzed by searching for counts of the wildtype and trans-product splicing junctions and a percentage was calculated.

### Discussion

[0453] Shorter hybridization regions, and smaller overall cargo sizes, are important for applications requiring a compact editing system.

[0454] This example assessed the minimal binding region for the trans-splicing cargo. Shorter hybridization regions have a relatively significant impact on splicing rates, with cargos that remove the 3′ 50 bp having the largest effect. This suggests that this particular region can be essential for the function of the cargo. These data suggest that relatively efficient splicing can occur even with cargos with shorter hybridizations than the ones used in this example—provided that they span or bind to critical regions of the intron.

### Example 34. 3′ Endogenous Trans-Splicing Rate for PPIB Gene

[0455] The 3′ endogenous trans-splicing rates (%) for the gene PPIB were assessed using one common cargo replacing the PPIB terminal exon and either a PPIB intron 4 or scrambled guide (FIG. 36). Cargos with insertions in linker region between hybridization and replacement exon were tested, wherein the linkers range from 14 bp to 100 bp at the largest.

[0456] The constructs were transfected at a 96-well scale on HEK293FT cells in DMEM 10% FBS. For endogenous splicing experiments, transfections were carried out using:
[0457] 10 ng of guide;
[0458] 10 ng of cargo plasmid; and
[0459] 40 ng of Cas7-11 plasmid,
   co-transfected using Lipofectamine 3000.

[0460] RNA was harvested 3 days post-transfection and reverse transcribed using the Thermo RevertAid cDNA prep kit with gene specific reverse transcription primers binding within the inserted or wildtype downstream exons. Two rounds of PCR were run using amplicon primers binding upstream and downstream of the targeted splicing junction and loaded on an Illumina MiSeq for sequencing. Following sequencing, raw reads were analyzed by searching for counts of the wildtype and trans-product splicing junctions and a percentage was calculated.

### Discussion

[0461] This example aims to explore how different structural arrangements of the cargo elements affect splicing rates. As different exons and introns range in size and position, varying the length or flexibility of the cargo can lead to an improvement of splicing rates due to sterics or accessibility of the various splicing components.

[0462] This example suggests that for PPIB, longer cargos can improve rates, with 14 bp and 25 bp longer linkers showing a modest improvement over the baseline cargo structure. Therefore, linker length can be an additional angle for tuning the efficiency of trans-splicing.

### Example 35. 3′ Endogenous Trans-Splicing Rate for PPIB Gene

[0463] The 3′ endogenous trans-splicing rates (%) for the gene PPIB were assessed using one common structure cargo replacing the PPIB terminal exon and either a PPIB intron 4 or scrambled guide (FIG. 37). As shown on FIG. 37, cargos based on the original cargo structure, but with larger hybridization regions were compared across the x axis, and the following bases were added (from left to right):
[0464] 100 bp 5′;
[0465] 100 bp 3′;
[0466] 150 bp 5′;
[0467] 150 bp 3′;
[0468] 25 bp 5′ and 3′;
[0469] 50 bp 5′ and 3′;
[0470] 50 bp 5′;
[0471] 50 bp 3′; and
[0472] 75 bp 5′ and 3′.

### Materials & Methods

[0473] The constructs were transfected at a 96-well scale on HEK293FT cells in DMEM 10% FBS. For endogenous splicing experiments, transfections were carried out using:
[0474] 10 ng of guide
[0475] 10 ng of cargo plasmid
[0476] 40 ng of Cas7-11 plasmid
   co-transfected using Lipofectamine 3000.

[0477] RNA was harvested 3 days post-transfection and reverse transcribed using the Thermo RevertAid cDNA prep kit with gene specific reverse transcription primers binding within the inserted or wildtype downstream exons. Two rounds of PCR were run using amplicon primers binding upstream and downstream of the targeted splicing junction and loaded on an Illumina MiSeq for sequencing. Following sequencing, raw reads were analyzed by searching for counts of the wildtype and trans-product splicing junctions and a percentage was calculated.

### Discussion

[0478] This example aims to explore how different sizes of homology region greater than the original cargo could affect splicing rates. A longer homology region could theoretically bind more favourably or interact with a region of the intron that biases splicing further towards the splicing product. However, these results indicate that larger cargos are likely less efficient, potentially due to factors such as secondary structure or covering of necessary intron elements. Interestingly, the size and position of the cargo can also change its behavior in the NT guide situation, potentially indicating that certain cargo designs would have more or less “background” splicing.

### Example 36. 3′ Endogenous Trans-Splicing Rate for STAT3 Gene

[0479] The 3′ endogenous trans-splicing rates (%) for the gene STAT3 were assessed using one common cargo structure replacing STAT3 exon 6 and a targeting or nontargeting guide for STAT3 intron 5 (FIG. 38). Variations of the original cargo with different branchpoint motifs were compared for effect on splicing rates. The motif sequences tested are shown across the x-axis of FIG. 38.

### Materials & Methods

[0480] The constructs were transfected at a 96-well scale on HEK293FT cells in DMEM 10% FBS. For endogenous splicing experiments, transfections were carried out using:
[0481] 10 ng of guide;
[0482] 10 ng of cargo plasmid; and
[0483] 40 ng of Cas7-11 plasmid,
   co-transfected using Lipofectamine 3000.

[0484] RNA was harvested 3 days post-transfection and reverse transcribed using the Thermo RevertAid cDNA prep kit with gene specific reverse transcription primers binding within the inserted or wildtype downstream exons. Two rounds of PCR were run using amplicon primers binding upstream and downstream of the targeted splicing junction and loaded on an Illumina MiSeq for sequencing. Following sequencing, raw reads were analyzed by searching for counts of the wildtype and trans-product splicing junctions and a percentage was calculated.

### Discussion

[0485] One of the major motifs relevant to mammalian splicing is the branch point, generally found upstream of the 3′ exon within the intron. For mammalian splicing, the consensus motif is yUnAy. In this example, every variation of this motif was tested for its impact on splicing efficiency. Relative to the original, non-consensus-motif cargo, nearly all variations tested perform significantly better, with motifs such as cTtAc or cTaAc delivering ˜2× higher splicing rates for STAT3.

[0486] Therefore, the inclusion and engineering of different branchpoints can be highly relevant for improving trans-splicing rates in this system, orthogonal to other improvements to nuclease efficiency or cargo structure.

### Example 37. 3′ Endogenous Trans-Splicing Rate for PPIB Gene

[0487] The 3′ endogenous trans-splicing rates (%) for the gene PPIB were assessed using one common structure cargo replacing the PPIB terminal exon and either a PPIB intron 4 or scrambled guide (FIG. 39). Variations of the original cargo with different branchpoint motifs were compared for effect on splicing rates. The motif sequences tested are shown across the x-axis in FIG. 39.

### Materials & Methods

[0488] The constructs were transfected at a 96-well scale on HEK293FT cells in DMEM 10% FBS. For endogenous splicing experiments, transfections were carried out using:
[0489] 10 ng of guide;
[0490] 10 ng of cargo plasmid; and
[0491] 40 ng of Cas7-11 plasmid,
   co-transfected using Lipofectamine 3000.

[0492] RNA was harvested 3 days post-transfection and reverse transcribed using the Thermo RevertAid cDNA prep kit with gene specific reverse transcription primers binding within the inserted or wildtype downstream exons. Two rounds of PCR were run using amplicon primers binding upstream and downstream of the targeted splicing junction and loaded on an Illumina MiSeq for sequencing. Following sequencing, raw reads were analyzed by searching for counts of the wildtype and trans-product splicing junctions and a percentage was calculated.

### Discussion

[0493] One of the major motifs relevant to mammalian splicing is the branch point, generally found upstream of the 3′ exon within the intron. For mammalian splicing, the consensus motif is yUnAy. In this example, variations of this motif were tested for its impact on splicing efficiency. Relative to the original, non-consensus-motif cargo, most of the variations tested performed significantly better, with motifs such as cTtAc or cTaAc delivering ˜2× higher splicing rates for PPIB.

[0494] Therefore, the inclusion and engineering of different branchpoints can be highly relevant for improving trans-splicing rates in this system, orthogonal to other improvements to nuclease efficiency or cargo structure.

### Example 38. 3′ Endogenous Trans-Splicing Rate for SHANK3 Gene, Exon 21

[0495] The 3′ endogenous trans-splicing rates (%) for the gene SHANK3, exon 21 were assessed (FIG. 40). Cargos were tested in combination with a set of arranged around a previous best guide identified in an initial screen, with guides 1-3 binding upstream of the previous best “guide H” and guides 4-6 binding downstream.

[0496] The constructs were transfected at a 96-well scale on HEK293FT cells in DMEM 10% FBS. For endogenous splicing experiments, transfections were carried out using:
[0497] 10 ng of guide;
[0498] 10 ng of cargo plasmid; and
[0499] 40 ng of Cas7-11 plasmid,
   co-transfected using Lipofectamine 3000.

[0500] RNA was harvested 3 days post-transfection and reverse transcribed using the Thermo RevertAid cDNA prep kit with gene specific reverse transcription primers binding within the inserted or wildtype downstream exons. Two rounds of PCR were run using amplicon primers binding upstream and downstream of the targeted splicing junction and loaded on an Illumina MiSeq for sequencing. Following sequencing, raw reads were analyzed by searching for counts of the wildtype and trans-product splicing junctions and a percentage was calculated.

### Discussion

[0501] Cleavage activity in the trans-splicing reaction is due both to nuclease activity and guide binding+accessibility. By tiling guides around positions that perform well, fine tuning of cleavage activity can be accomplished. This example shows that tiling (testing guides in close proximity to other working guides) can further increase splicing efficiency for a given locus of interest.

### Example 39. 3′ Endogenous Trans-Splicing Rate for SHANK3 Gene

[0502] The 3′ endogenous trans-splicing rates (%) for the gene SHANK3 were assessed using one common cargo replacing the SHANK3 exon 21 and either a SHANK3 intron 20 or scrambled guide (FIG. 41). The wildtype disCas7-11 nuclease was compared against constructs with a direct (no intervening linker) or indirect (XTEN linker intervening) fusion to various splicing proteins (RMB17, SF3B6, U2AF1, or U2AF2) at their N- or C-terminals, as well as constructs generated through rounds of mutagenesis of disCas7-11 that show higher catalytic activity. Constructs that combine working N- and C-terminal fusion constructs into editors with multiple fusions (both N- and C-, or tandem N- and C-) were also tested.

### Materials & Methods

[0503] The constructs were transfected at a 96-well scale on HEK293FT cells in DMEM 10% FBS. For endogenous splicing experiments, transfections were carried out using:
[0504] 10 ng of guide;
[0505] 10 ng of cargo plasmid; and
[0506] 40 ng of Cas7-11 plasmid,
   co-transfected using Lipofectamine 3000.

[0507] RNA was harvested 3 days post-transfection and reverse transcribed using the Thermo RevertAid cDNA prep kit with gene specific reverse transcription primers binding within the inserted or wildtype downstream exons. Two rounds of PCR were run using amplicon primers binding upstream and downstream of the targeted splicing junction and loaded on an Illumina MiSeq for sequencing. Following sequencing, raw reads were analyzed by searching for counts of the wildtype and trans-product splicing junctions and a percentage was calculated.

### Discussion

[0508] Fusions of splicing related proteins, such as the various members of the spliceosome, to the Cas7-11 effector can provide an orthogonal (not cleavage dependent) mechanism for increasing trans-splicing rates. This fusion approach is analogous to how CRISPR-based technologies such as Prime editing or CRISPR activation gain efficiency through recruitment or delivery of relevant factors with the major effector.

[0509] In this example, several fusions of spliceosome proteins increase trans-splicing rates relative to the wildtype Cas7-11. Additionally, tandem or both N- and C-terminal constructs performed better than wildtype Cas7-11 in this comparison.

### Example 40. 3′ Endogenous Trans-Splicing Rate for STAT3 Gene

[0510] The 3′ endogenous trans-splicing rates (%) for the gene STAT3 were assessed using one common cargo structure replacing STAT3 exon 6 and a targeting or nontargeting guide for STAT3 intron 5 (FIG. 42). The wildtype disCas7-11 nuclease was compared against constructs with a direct (no intervening linker) or indirect (XTEN linker intervening) fusion to various splicing proteins (RMB17, SF3B6, U2AF1, or U2AF2) at their N- or C-terminals, as well as constructs generated through rounds of mutagenesis of disCas7-11 that show higher catalytic activity. Constructs that combine working N- and C-terminal fusion constructs into editors with multiple fusions (both N- and C-, or tandem N- and C-) were also tested.

### Materials & Methods

[0511] The constructs were transfected at a 96-well scale on HEK293FT cells in DMEM 10% FBS. For endogenous splicing experiments, transfections were carried out using:
[0512] 10 ng of guide;
[0513] 10 ng of cargo plasmid; and
[0514] 40 ng of Cas7-11 plasmid,
   co-transfected using Lipofectamine 3000.

[0515] RNA was harvested 3 days post-transfection and reverse transcribed using the Thermo RevertAid cDNA prep kit with gene specific reverse transcription primers binding within the inserted or wildtype downstream exons. Two rounds of PCR were run using amplicon primers binding upstream and downstream of the targeted splicing junction and loaded on an Illumina MiSeq for sequencing. Following sequencing, raw reads were analyzed by searching for counts of the wildtype and trans-product splicing junctions and a percentage was calculated.

### Discussion

[0516] Fusions of splicing related proteins, such as the various members of the spliceosome, to the Cas7-11 effector can provide an orthogonal (not cleavage dependent) mechanism for increasing trans-splicing rates. This fusion approach is analogous to how CRISPR-based technologies such as Prime editing or CRISPR activation gain efficiency through recruitment or delivery of relevant factors with the major effector.

[0517] In this example, several fusions of spliceosome proteins were found to increase trans-splicing rates relative to the wildtype Cas7-11. Additional, tandem or both N- and C-terminal constructs were found to perform much better than wildtype Cas7-11 in this comparison.

[0518] Together with the other genes tested with these constructs, it is observed that there can be a gene or exon specific effect from fusions—potentially due to different spliceosome components or behaviour dependent on the situation.

### Example 41. 3′ Endogenous Trans-Splicing Rate for PPIB and STAT3 Genes Either Alone or Edited Simultaneously

[0519] The 3′ endogenous trans-splicing rates (%) for the genes PPIB and STAT3 either alone or edited simultaneously were assessed (FIG. 43). In FIG. 43, shown on the x-axis are conditions with either the conventional guide+cargo combination, or a single guide and cargo carrying plasmid substituting for the two. Also shown are conditions where single-vector guide cargo plasmids for multiple genes are co-transfected.

[0520] The constructs were transfected at a 96-well scale on HEK293FT cells in DMEM 10% FBS. For endogenous splicing experiments, transfections were carried out using:
[0521] 10 ng of guide;
[0522] 10 ng of cargo plasmid, or 20+ng of single vector constructs; and
[0523] 40 ng of Cas7-11 plasmid,
   co-transfected using Lipofectamine 3000.

[0524] Multiple DNA amounts of guide and cargo were used per gene assayed in each condition. Single vector constructs were tested at 10, 20, 40, or 60 ng per target. RNA was harvested 3 days post-transfection and reverse transcribed using the Thermo RevertAid cDNA prep kit with gene specific reverse transcription primers binding within the inserted or wildtype downstream exons. Two rounds of PCR were run using amplicon primers binding upstream and downstream of the targeted splicing junction and loaded on an Illumina MiSeq for sequencing. Following sequencing, raw reads were analyzed by searching for counts of the wildtype and trans-product splicing junctions and a percentage was calculated.

### Discussion

[0525] This result shows that relative to the triple transfection strategy (furthest left for each gene), a double transfection where guide and cargo are combined onto a single plasmid boosts efficiency. This is likely due to improved delivery of the constructs to the same cell.

[0526] This result is encouraging for future applications leveraging AAV or other viral delivery mechanisms, where keeping the number of parts involved to the minimum is essential for efficient delivery.

### Example 42. 3′ Endogenous Trans-Splicing Rate for STAT3 Gene

[0527] The 3′ endogenous trans-splicing rates (%) for the gene STAT3 were assessed using one common cargo structure replacing STAT3 exon 6 and a targeting or nontargeting guide for STAT3 intron 5 (FIG. 44). The original cargo (furthest left in FIG. 44) was compared against variants with ESE sequence motifs inserted 3′ to the inserted region.

### Materials & Methods

[0528] The constructs were transfected at a 96-well scale on HEK293FT cells in DMEM 10% FBS. For endogenous splicing experiments, transfections were carried out using:
[0529] 10 ng of guide;
[0530] 10 ng of cargo plasmid; and
[0531] 40 ng of Cas7-11 plasmid,
   co-transfected using Lipofectamine 3000.

[0532] RNA was harvested 3 days post-transfection and reverse transcribed using the Thermo RevertAid cDNA prep kit with gene specific reverse transcription primers binding within the inserted or wildtype downstream exons. Two rounds of PCR were run using amplicon primers binding upstream and downstream of the targeted splicing junction and loaded on an Illumina MiSeq for sequencing. Following sequencing, raw reads were analyzed by searching for counts of the wildtype and trans-product splicing junctions and a percentage was calculated.

### Discussion

[0533] Exonic splicing enhancers (ESEs) are DNA sequence motifs suggested to have a role in biasing the inclusion of one exon over another. In this example, short ESE motifs are included downstream of the cargo to see whether they boost trans-splicing rates in this context.

[0534] Several of the ESEs tested can improve trans-splicing for this STAT3 exon, while others perform similarly or worse than the original cargo. Therefore, ESEs can be used to further optimize specific trans-splicing cargos.

### Example 43. 3′ Endogenous Trans-Splicing Rate for SHANK3 Gene

[0535] The 3′ endogenous trans-splicing rates (%) for the gene SHANK3 were assessed using one common cargo structure replacing SHANK3 exon 21 and a targeting or nontargeting guide for SHANK3 intron 20 (FIG. 45). The original cargo (furthest left in FIG. 45) was compared against variants with ESE sequence motifs inserted 3′ to the inserted region. Variations of the original cargo with different branchpoint motifs, compared for effect on splicing rates, were also assessed. These sequences were found to be the best performing branchpoint motifs from a comprehensive screen on PPIB and STAT3.

### Materials & Methods

[0536] The constructs were transfected at a 96-well scale on HEK293FT cells in DMEM 10% FBS. For endogenous splicing experiments, transfections were carried out using:
[0537] 10 ng of guide;
[0538] 10 ng of cargo plasmid; and
[0539] 40 ng of Cas7-11 plasmid,
   co-transfected using Lipofectamine 3000.

[0540] RNA was harvested 3 days post-transfection and reverse transcribed using the Thermo RevertAid cDNA prep kit with gene specific reverse transcription primers binding within the inserted or wildtype downstream exons. Two rounds of PCR were run using amplicon primers binding upstream and downstream of the targeted splicing junction and loaded on an Illumina MiSeq for sequencing. Following sequencing, raw reads were analyzed by searching for counts of the wildtype and trans-product splicing junctions and a percentage was calculated.

### Discussion

[0541] Exonic splicing enhancers (ESEs) are DNA sequence motifs suggested to have a role in biasing the inclusion of one exon over another. In this example, short ESE motifs are included downstream of the cargo to see whether they boost trans-splicing rates in this context. Several of the ESEs tested can improve trans-splicing for this STAT3 exon, while others perform similarly or worse than the original cargo. Therefore, ESEs can provide an addition way to further optimize trans-splicing cargos.

[0542] Similarly, the branch point sequences confer a boost to trans-splicing rates, in alignment with results from other genes tested that show that the inclusion of specific splice motifs can have a large improvement on rates.

### Example 44. 3′ Endogenous Trans-Splicing Rate for STAT3 Gene

[0543] The 3′ endogenous trans-splicing rates (%) for the gene STAT3 were assessed using one common cargo structure replacing STAT3 exon 6 and a targeting or nontargeting guide for STAT3 intron 5 combined on a single plasmid (FIG. 46). The wildtype disCas7-11 nuclease was compared against constructs with a direct (no intervening linker) or indirect (XTEN linker intervening) fusion to various splicing proteins (RMB17, SF3B6, U2AF1, or U2AF2) at their N- or C-terminals, as well as constructs generated through rounds of mutagenesis of disCas7-11 that show higher catalytic activity.

### Materials & Methods

[0544] The constructs were transfected at a 96-well scale on HEK293FT cells in DMEM 10% FBS. For endogenous splicing experiments, transfections were carried out using:
[0545] 10 ng of guide;
[0546] 10 ng of cargo plasmid; and
[0547] 40 ng of Cas7-11 plasmid,
   co-transfected using Lipofectamine 3000.

[0548] RNA was harvested 3 days post-transfection and reverse transcribed using the Thermo RevertAid cDNA prep kit with gene specific reverse transcription primers binding within the inserted or wildtype downstream exons. Two rounds of PCR were run using amplicon primers binding upstream and downstream of the targeted splicing junction and loaded on an Illumina MiSeq for sequencing. Following sequencing, raw reads were analyzed by searching for counts of the wildtype and trans-product splicing junctions and a percentage was calculated.

### Discussion

[0549] Fusions of splicing related proteins, such as the various members of the spliceosome, to the Cas7-11 effector can provide an orthogonal (not cleavage dependent) mechanism for increasing trans-splicing rates. This fusion approach is analogous to how CRISPR-based technologies such as Prime editing or CRISPR activation gain efficiency through recruitment or delivery of relevant factors with the major effector.

[0550] In this example, several fusions of spliceosome proteins increase trans-splicing rates relative to the wildtype Cas7-11. Similarly, improvements to catalytic activity of the disCas7-11 improve overall trans-splicing rates, suggesting that intron cleavage is a rate-limiting factor for trans-splicing. These improvements further scale with the single-vector versions of the STAT3 constructs, where guides and cargos are cloned into a single plasmid. This shows that multiple orthogonal methods for improving efficiency are compatible with each other and can be developed in parallel for a given target.

### Example 45. 3′ Endogenous Trans-Splicing Rate for SHANK3 Gene

[0551] The 3′ endogenous trans-splicing rates (%) for the gene SHANK3 were assessed using one common cargo structure replacing SHANK3 exon 21 and a targeting or nontargeting guide for SHANK3 intron 20 combined on a single plasmid (FIG. 47). The wildtype disCas7-11 nuclease was compared against constructs with a direct (no intervening linker) or indirect (XTEN linker intervening) fusion to various splicing proteins (RMB17, SF3B6, U2AF1, or U2AF2) at their N- or C-terminals, as well as constructs generated through rounds of mutagenesis of disCas7-11 that show higher catalytic activity.

[0552] The constructs were transfected at a 96-well scale on HEK293FT cells in DMEM 10% FBS. For endogenous splicing experiments, transfections were carried out using:
[0553] 10 ng of guide;
[0554] 10 ng of cargo plasmid; and
[0555] 40 ng of Cas7-11 plasmid,
   co-transfected using Lipofectamine 3000.

[0556] RNA was harvested 3 days post-transfection and reverse transcribed using the Thermo RevertAid cDNA prep kit with gene specific reverse transcription primers binding within the inserted or wildtype downstream exons. Two rounds of PCR were run using amplicon primers binding upstream and downstream of the targeted splicing junction and loaded on an Illumina MiSeq for sequencing. Following sequencing, raw reads were analyzed by searching for counts of the wildtype and trans-product splicing junctions and a percentage was calculated.

### Discussion

[0557] Fusions of splicing related proteins, such as the various members of the spliceosome, to the Cas7-11 effector can provide an orthogonal (not cleavage dependent) mechanism for increasing trans-splicing rates. This fusion approach is analogous to how CRISPR-based technologies such as Prime editing or CRISPR activation gain efficiency through recruitment or delivery of relevant factors with the major effector.

[0558] In this example, several fusions of spliceosome proteins were found to increase trans-splicing rates relative to the wildtype Cas7-11. Similarly, improvements to catalytic activity of the disCas7-11 improve overall trans-splicing rates, suggesting that intron cleavage is a rate-limiting factor for trans-splicing. These improvements further scale with the single vector versions of the SHANK3 constructs, where guides and cargos are cloned into a single plasmid. This shows that multiple orthogonal methods for improving efficiency are compatible with each other and can be developed in parallel for a given target, and that the improvements seen for other genes (e.g., STAT3) are generalizable.

### Example 46. 3′ Endogenous Trans-Splicing Rate for STAT3 and PPIB Genes

[0559] The 3′ endogenous trans-splicing rates (%) for the genes STAT3 and PPIB were assessed (FIG. 48A and FIG. 48B). The 3′ endogenous trans-splicing rate (%) for the gene STAT3 was probed using one common cargo replacing STAT3 exon 6 and either a Cas7-11 guide RNA targeting the STAT3 intron 5 or a guide scrambled sequence. The 3′ endogenous trans-splicing rate (%) for the gene PPIB was probed using one common structure cargo replacing the PPIB terminal exon and either a PPIB intron 4 or scrambled guide with the same set of truncated spliceosome fusions. Different truncated versions of the disCas7-11 (plotted on x axis of FIG. 48A and FIG. 48B) were compared for editing efficiency and tested combined with a direct (no intervening linker) or indirect (XTEN linker intervening) fusion to various splicing proteins (RMB17, SF3B6, U2AF1, or U2AF2) at their N- or C-terminals.

### Materials & Methods

[0560] The constructs were transfected at a 96-well scale on HEK293FT cells in DMEM 10% FBS. For endogenous splicing experiments, transfections were carried out using:
[0561] 10 ng of guide;
[0562] 10 ng of cargo plasmid; and
[0563] 40 ng of Cas7-11 plasmid,
   co-transfected using Lipofectamine 3000.

[0564] RNA was harvested 3 days post-transfection and reverse transcribed using the Thermo RevertAid cDNA prep kit with gene specific reverse transcription primers binding within the inserted or wildtype downstream exons. Two rounds of PCR were run using amplicon primers binding upstream and downstream of the targeted splicing junction and loaded on an Illumina MiSeq for sequencing. Following sequencing, raw reads were analyzed by searching for counts of the wildtype and trans-product splicing junctions and a percentage was calculated.

### Discussion

[0565] Smaller Cas7-11 nucleases are of interest as a lower overall size allows for more options for delivery (e.g., the use of AAV vectors or combinations of constructs). This example demonstrates that smaller, truncated Cas7-11 variants cause a major drop-off in efficiency of trans-splicing, likely due to a loss of catalytic activity. However, fusions of Cas7-1 is with splicing proteins (as previously done for the full-length disCas7-11) can rescue the overall splicing rate, in particular for PPIB.

### Example 47. 3′ Endogenous Trans-Splicing Rate for SHANK3 Gene

[0566] The 3′ endogenous trans-splicing rates (%) for the gene SHANK3 were assessed using conventional or lentiviral vectors (FIG. 49). Wild type, triple mutant and small Cas7-11 either in conventional or lentiviral vectors, were combined with either a conventional or lentiviral single vector (GC) expressing a guide RNA targeting the SHANK3 intron 20 and a cargo replacing SHANK3 exon 21. Different combinations (on the x-axis from FIG. 49) were compared for editing efficiency. The constructs cloned into lentiviral vectors were compared with the conventional vectors to see if there is any functional loss caused by the lentiviral backbone.

### Materials & Methods

[0567] The constructs were transfected at a 96-well scale on HEK293FT cells in DMEM 10% FBS. For endogenous splicing experiments, transfections were carried out using:
[0568] 10 ng of guide;
[0569] 10 ng of cargo plasmid; and
[0570] 40 ng of Cas7-11 plasmid,
   co-transfected using Lipofectamine 3000.

[0571] RNA was harvested 3 days post-transfection and reverse transcribed using the Thermo RevertAid cDNA prep kit with gene specific reverse transcription primers binding within the inserted or wildtype downstream exons. Two rounds of PCR were run using amplicon primers binding upstream and downstream of the targeted splicing junction and loaded on an Illumina MiSeq for sequencing. Following sequencing, raw reads were analyzed by searching for counts of the wildtype and trans-product splicing junctions and a percentage was calculated.

### Discussion

[0572] Lentiviral packaging of Cas7-11, guide and cargo vectors is of interest as it enables to generate cell lines stably expressing these constructs. This approach allows for the editing efficiency to be not limited by the transfection efficiency and enables editing in primary cells that are difficult to transfect.

### Example 48. 3′ Endogenous Trans-Splicing Rate for SHANK3 Gene

[0573] The 3′ endogenous trans-splicing rates (%) for the gene SHANK3 were assessed using different volumes of 2 lentiviruses either alone or in combination (FIG. 50). The first virus was designed to package a vector expressing a guide RNA targeting the SHANK3 intron 20 and a cargo replacing SHANK3 exon 21. The second virus was designed to package a vector expressing Cas7-11. On the bar graph of FIG. 50, each condition is noted on the x-axis, and editing efficiency for each condition is shown on the y-axis.

### Materials & Methods

[0574] Lentiviruses were produced in HEK293FT cells cultured in T225 flasks, by transfection of 30 g of packaging plasmid (psPAX2), 30 g of envelope plasmid (VSV-G), and 30 g of transfer plasmid (lenti Cas7-11 or lenti guide&cargo) using 270 μL of polyethylene imine (PEI). Media containing lentiviruses were harvested after 48 h of transfection, ultracentrifuged for 2 h at 120,000 g, and concentrated 100× by resuspending in PBS. HEK293FT cells were infected with lentiviruses at a 96-well scale in DMEM 10% FBS, by following virus volumes:
[0575] 0, 10 or 20 μl of guide and cargo viruses; and
[0576] 0, 20 or 40 μl of Cas7-11 viruses.

[0577] RNA was harvested 7 days post-transduction and reverse transcribed using the Thermo RevertAid cDNA prep kit with gene specific reverse transcription primers binding within the inserted or wildtype downstream exons. Two rounds of PCR were run using amplicon primers binding upstream and downstream of the targeted splicing junction and loaded on an Illumina MiSeq for sequencing. Following sequencing, raw reads were analyzed by searching for counts of the wildtype and trans-product splicing junctions and a percentage was calculated.

### Discussion

[0578] Lentiviral packaging of Cas7-11, guide and cargo vectors are of interest as it enables to generate cell lines stably expressing these constructs. This approach allows for the editing efficiency to be not limited by the transfection efficiency and enables editing in primary cells that are difficult to transfect.

[0579] In this example, lentiviruses packaging Cas7-11 or single guide and cargo vectors were used to infect HEK293FT cells. About 30% editing was observed in the cells co-infected with both lentiviruses.

### Example 49. 3′ Endogenous Trans-Splicing of PPIB Gene

[0580] The 3′ endogenous trans-splicing of the gene PPIB was assessed using a cargo replacing the PPIB terminal exon and containing 1× or 3×Flag or 1×HA tags, and either a PPIB intron 4 targeting or scrambled guide RNA (FIG. 51A and FIG. 51B). The bar graph of FIG. 51B reports the 3′ endogenous trans-splicing rate (%) for the gene PPIB as a confirmation of the Western blot of FIG. 51A.

[0581] The constructs were transfected at a 6-well scale on HEK293FT cells in DMEM 10% FBS. For endogenous splicing experiments, transfections were carried out using:
[0582] 400 ng of guide;
[0583] 400 ng of cargo plasmid; and
[0584] 1600 ng of Cas7-11 plasmid,
   co-transfected using Lipofectamine 3000.

[0585] Each condition was transfected on 2 wells. 3 days post-transfection, RNA was harvested from 1 well, and protein was harvested from the other well, by specific lysis buffers.

[0586] Harvested RNA reverse transcribed using the Thermo RevertAid cDNA prep kit with gene specific reverse transcription primers binding within the inserted or wildtype downstream exons. Two rounds of PCR were run using amplicon primers binding upstream and downstream of the targeted splicing junction and loaded on an Illumina MiSeq for sequencing. Following sequencing, raw reads were analyzed by searching for counts of the wildtype and trans-product splicing junctions and a percentage was calculated.

[0587] Protein concentration was determined by BCA assay, and equal amounts from each sample were run on Bio-Rad 4-20% Mini-PROTEAN gel. They were transferred on nitrocellulose membrane via Thermo iBlot-2 transfer device, blocked for 1 h at RT, and incubated overnight with primary antibody at 4° C. Next day, membrane was washed before and after incubation with secondary antibody for 1 h at RT and imaged by LI-COR Odyssey Scanner.

### Discussion

[0588] Even though trans-splicing occurs in the RNA-level, a goal of using this tool is replacing disease-related mutant proteins with the wild type versions. Therefore, to validate editing results in RNA-level, and show the translation of trans-spliced product, Western blot is one of the most important techniques.

### Example 50. 3′ Trans-Splicing Rate for USF1 Gene

[0589] The 3′ trans-splicing of the gene USF1 was assessed using 4 different components: first, either a non-targeting or a targeting cargo replacing the USF1 terminal exon and containing an XTEN linker and 3×Flag tag; second, a USF1 intron 10 targeting or scrambled guide RNA; third, a reporter plasmid containing USF1 cDNA with intron 10 in between the all the upstream and downstream exons; and fourth, Cas7-11 was included in all conditions (FIG. 52A and FIG. 52B). The bar graph of FIG. 52B reports the 3′ trans-splicing rate (%) for the gene USF1 as a confirmation of the Western blot from FIG. 52A. With Cas7-11 and targeting guide, about 40% and 80% of editing were obtained for endogenous or reporter trans-splicing, respectively.

### Materials and Methods

[0590] The constructs were transfected at a 6-well scale on HEK293FT cells in DMEM 10% FBS. Transfections were carried out using:
[0591] 400 ng of guide;
[0592] 400 ng of cargo plasmid; and
[0593] 1600 ng of Cas7-11 plasmid,
   co-transfected using Lipofectamine 3000.

[0594] Each condition was transfected on 2 wells. 3 days post-transfection, RNA was harvested from 1 well, and protein was harvested from the other well, by specific lysis buffers.

[0595] Harvested RNA reverse transcribed using the Thermo RevertAid cDNA prep kit with gene specific reverse transcription primers binding within the inserted or wildtype downstream exons. Two rounds of PCR were run using amplicon primers binding upstream and downstream of the targeted splicing junction and loaded on an Illumina MiSeq for sequencing. Following sequencing, raw reads were analyzed by searching for counts of the wildtype and trans-product splicing junctions and a percentage was calculated.

[0596] Protein concentration was determined by BCA assay, and equal amounts from each sample were run on Bio-Rad 4-20% Mini-PROTEAN gel. They were transferred on nitrocellulose membrane via Thermo iBlot-2 transfer device, blocked for 1 h at RT, and incubated overnight with primary antibody at 4° C. Next day, membrane was washed before and after incubation with secondary antibody for 1 h at RT, and imaged by LI-COR Odyssey Scanner.

### Discussion

[0597] Even though trans-splicing occurs in the RNA-level, a goal of using this tool is replacing disease-related mutant proteins with the wild type versions. Therefore, to validate editing results in RNA-level, and show the translation of trans-spliced product, Western blot is one of the most important techniques.

### Example 51. 3′ Trans-Splicing Rate for gLuc Gene

[0598] The 3′ trans-splicing rates (%) for the gene gLuc were assessed in a reporter plasmid (FIG. 53). Effects of 2 different cargo, together with 3 targeting and 1 non-targeting guide, and either functional or dead Cas7-11 on 3′ trans-splicing were measured. Positive effects of a functional Cas7-11 and targeting guides over non-targeting is clear. Cargo 6 and guide Y were selected for the further experiments.

### Materials and Methods

[0599] To represent the actual trans-splicing, cDNA expressing gLuc were split with an intron between them, and a coding region was truncated to eliminate any background. Truncated region, together with the downstream part of the gene were included in the cargo. This way, only after a targeted trans-splicing, a functional gLuc will be expressed. In the same plasmid, a full length cLuc gene was used as a transfection control.

[0600] The constructs were transfected at a 96-well scale on HEK293FT cells in DMEM 10% FBS. Transfections were carried out using:
[0601] 10 ng of guide;
[0602] 10 ng of cargo plasmid;
[0603] 10 ng of reporter plasmid; and
[0604] 40 ng of Cas7-11 plasmid,
   co-transfected using Lipofectamine 3000.

[0605] Culture media containing secreted luciferase was collected after 2 days of transfection. 201 from each well, together with the Gaussia Luciferase Assay reagent (GAR-2B; Targeting Systems) or the Cypridina Luciferase Assay reagent (VLAR-2; Targeting Systems) were used to perform gLuc and cLuc assays, according to the manufacturer's instructions. Luminescence were measured on a Biotek Synergy Neo 2 reader. gLuc/cLuc values were used to represent trans-splicing ratio to normalize the transfection efficiency between wells.

### Discussion

[0606] A reporter system for 3′ trans-splicing provides a fast and easy way to test effects of different constructs on trans-splicing rate. It can be used as a first step for screening new constructs to find the ones improving trans-splicing, before moving on to the endogenous 3′ trans-splicing.

### Example 52. 5′ Trans-Splicing Rate for HTT Gene

[0607] The 5′ trans-splicing rate (%) for HTT exon 1 were assessed using cargos that bind to intron 1 and a guide targeting the terminal end of the cargo hybridization or a scrambled NT sequence (FIG. 54). Variations of the cargo that incorporate different sequence motifs, including 5′ splicing consensus motifs, branch points, snRNA recognition sequences, predicted splicing enhancer sequences, or combinations of the above were compared for effect on splicing rates. Different guide sequences tiled around best performing guides from an initial screen were transfected with each cargo to determine whether guide placement further improves rates.

### Materials and Methods

[0608] The constructs were transfected at a 96-well scale on HEK293FT cells in DMEM 10% FBS. For endogenous splicing experiments, transfections were carried out using:
[0609] 10 ng of guide;
[0610] 10 ng of cargo plasmid; and
[0611] 40 ng of Cas7-11 plasmid,
   co-transfected using Lipofectamine 3000.

[0612] RNA was harvested 3 days post-transfection and reverse transcribed using the Thermo RevertAid cDNA prep kit with gene specific reverse transcription primers binding within the downstream exons. Two rounds of PCR were run using amplicon primers binding upstream and downstream of the targeted splicing junction and loaded on an Illumina MiSeq for sequencing. Following sequencing, raw reads were analyzed by searching for counts of the wildtype and trans-product splicing junctions and a percentage was calculated.

### Discussion

[0613] This example compares a wide range of different 5′ splicing architectures for cargos targeting the first exon of HTT. Several of these components have effects on the splicing rate, with the original cargo listed 2^{nd} from right performing nearly as well as the best hit. The largest improvements to splicing rates come from inclusion of the branch point and GURAGU motif (known to participate in the splicing reaction).

[0614] These results suggest that a relatively basic structure for a cargo accomplishes most of the splicing rate for 5′ trans-splicing and confirms that the ISE and GURAGU/GUUAGU are essential for highly efficient splicing. Different cargo structures also show different preferences for guides.

### Example 53. 5′ Trans-Splicing Rate for HTT Gene

[0615] The 5′ trans-splicing rates (%) for HTT exon 1 were assessed using cargo constructs with hybridization regions that bind intron 1 of the HTT premRNA and either a scrambled guide or a guide that binds and cleaves the end of the hybridization (FIG. 55). Splicing rate was reported for both truncated Cas7-11 and truncated Cas7-11 with top-performing mutations from a screen on full-length Cas7-11.

### Materials and Method

[0616] The constructs were transfected at a 96-well scale on HEK293FT cells in DMEM 10% FBS. For endogenous splicing experiments, transfections were carried out using:
[0617] 10 ng of guide;
[0618] 10 ng of cargo plasmid; and
[0619] 40 ng of Cas7-11 plasmid,
   co-transfected using Lipofectamine 3000.

[0620] RNA was harvested 3 days post-transfection and reverse transcribed using the Thermo RevertAid cDNA prep kit with gene specific reverse transcription primers binding within downstream exons. Two rounds of PCR were run using amplicon primers binding upstream and downstream of the targeted splicing junction and loaded on an Illumina MiSeq for sequencing. Following sequencing, raw reads were analyzed by searching for counts of the wildtype and trans-product splicing junctions and a percentage was calculated.

### Discussion

[0621] This example tests constructs to be used for an AAV packaging system for trans-splicing for 5′ splicing of HTT. The truncated Cas7-11 necessary for AAV packaging (to fit within the size constraints of an AAV backbone) performs less than the full length cas7-11 wt, which reflect equivalent results from other comparisons of full length and truncated nucleases. It is likely that the smaller constructs needed for AAV delivery of trans-splicing components can reduce splicing efficiency. However, the degree to which can be variable and related to specific genes.

### Example 54. 5′ Trans-Splicing Rate for HTT Gene

[0622] The 5′ trans-splicing rates (%) for HTT exon 1 were assessed using cargos that bind to intron 1 and a guide targeting the terminal end of the cargo hybridization, or a scrambled NT sequence combined on a single plasmid (FIG. 56). The wildtype disCas7-11 nuclease as compared against constructs with a direct (no intervening linker) or indirect (XTEN linker intervening) fusion to various splicing proteins (RMB17, SF3B6, U2AF1, or U2AF2) at their N- or C-terminals, as well as constructs generated through rounds of mutagenesis of disCas7-11 that show higher catalytic activity.

### Materials and Methods

[0623] The constructs were transfected at a 96-well scale on HEK293FT cells in DMEM 10% FBS. For endogenous splicing experiments, transfections were carried out using:
[0624] 10 ng of guide;
[0625] 10 ng of cargo plasmid; and
[0626] 40 ng of Cas7-11 plasmid,
   co-transfected using Lipofectamine 3000.

[0627] RNA was harvested 3 days post-transfection and reverse transcribed using the Thermo RevertAid cDNA prep kit with gene specific reverse transcription primers binding within the inserted or wildtype downstream exons. Two rounds of PCR were run using amplicon primers binding upstream and downstream of the targeted splicing junction and loaded on an Illumina MiSeq for sequencing. Following sequencing, raw reads were analyzed by searching for counts of the wildtype and trans-product splicing junctions and a percentage was calculated.

### Discussion

[0628] Fusions of splicing related proteins, such as the various members of the spliceosome, to the Cas7-11 effector can provide an orthogonal (not cleavage dependent) mechanism for increasing trans-splicing rates. This fusion approach is analogous to how CRISPR-based technologies such as Prime editing or CRISPR activation gain efficiency through recruitment or delivery of relevant factors with the major effector.

[0629] In this example, several fusions of spliceosome proteins increase trans-splicing rates relative to the wildtype Cas7-11. Similarly, improvements to catalytic activity of the disCas7-11 improve overall trans-splicing rates, suggesting that intron cleavage is a rate-limiting factor for trans-splicing. These improvements further scale with the single vector versions of the HTT constructs, where guides and cargos are cloned into a single plasmid. This shows that multiple orthogonal methods for improving efficiency are compatible with each other and can be developed in parallel for a given target, and that the improvements seen for other genes (e.g., STAT3) are generalizable.

### Example 55. 5′ Trans-Splicing Rate for HTT Gene

[0630] The 5′ trans-splicing rate (%) for HTT exon 1 were assessed using cargos that bind to intron 1 and a guide targeting the terminal end of the cargo hybridization or a scrambled NT sequence (FIG. 57). Variations of the cargo that incorporate different sequence motifs, including 5′ splicing consensus motifs, branch points, snRNA recognition sequences, predicted splicing enhancer sequences, or combinations of the above were compared for effect on splicing rates.

### Materials and Methods

[0631] The constructs were transfected at a 96-well scale on HEK293FT cells in DMEM 10% FBS. For endogenous splicing experiments, transfections were carried out using:
[0632] 10 ng of guide;
[0633] 10 ng of cargo plasmid; and
[0634] 40 ng of Cas7-11 plasmid,
   co-transfected using Lipofectamine 3000.

[0635] RNA was harvested 3 days post-transfection and reverse transcribed using the Thermo RevertAid cDNA prep kit with gene specific reverse transcription primers binding within the inserted or wildtype downstream exons. Two rounds of PCR were run using amplicon primers binding upstream and downstream of the targeted splicing junction and loaded on an Illumina MiSeq for sequencing. Following sequencing, raw reads were analyzed by searching for counts of the wildtype and trans-product splicing junctions and a percentage was calculated.

### Discussion

[0636] This example compares a wide range of different 5′ splicing architectures for cargos targeting the first exon of HTT. Several of these components have effects on the splicing rate, with the original cargo listed 2^{nd} from right performing nearly as well as the best hit. The largest improvements to splicing rates come from inclusion of the branch point and GURAGU motif (known to participate in the splicing reaction).

[0637] These results suggest that a relatively basic structure for a cargo accomplishes most of the splicing rate for 5′ trans-splicing and confirms that the ISE and GURAGU/GUUAGU are essential for highly efficient splicing.

### Example 56. 5′ Trans-Splicing Rate for HTT Gene

[0638] The 5′ trans-splicing rate (%) for HTT exon 1 were assessed using cargos that bind to intron 1 and a guide targeting the terminal end of the cargo hybridization or a scrambled NT sequence (FIG. 58). Variations of the cargo that incorporate different sequence motifs, including 5′ splicing consensus motifs, branch points, snRNA recognition sequences, predicted splicing enhancer sequences, or combinations of the above were compared for effect on splicing rates.

### Materials and Methods

[0639] The constructs were transfected at a 96-well scale on HEK293FT cells in DMEM 10% FBS. For endogenous splicing experiments, transfections were carried out using:
[0640] 10 ng of guide;
[0641] 10 ng of cargo plasmid; and
[0642] 40 ng of Cas7-11 plasmid,
   co-transfected using Lipofectamine 3000.

[0643] RNA was harvested 3 days post-transfection and reverse transcribed using the Thermo RevertAid cDNA prep kit with gene specific reverse transcription primers binding within the inserted or wildtype downstream exons. Two rounds of PCR were run using amplicon primers binding upstream and downstream of the targeted splicing junction and loaded on an Illumina MiSeq for sequencing. Following sequencing, raw reads were analyzed by searching for counts of the wildtype and trans-product splicing junctions and a percentage was calculated.

### Discussion

[0644] FIG. 58 is a subset of a previous larger panel which compares a wide range of different 5′ splicing architectures for cargos targeting the first exon of HTT. Several of these components have effects on the splicing rate, with the original cargo listed 2nd from right performing nearly as well as the best hit. The largest improvements to splicing rates come from inclusion of the branch point and GURAGU motif (known to participate in the splicing reaction).

[0645] These results suggest that a relatively basic structure for a cargo accomplishes most of the splicing rate for 5′ trans-splicing and confirms that the ISE and GURAGU/GUUAGU are essential for highly efficient splicing. In particular, cargos without a GURAGU motif can be incapable of splicing (3rd from right includes, compared to 2 furthest right in FIG. 58).

### Example 57. 5′ Trans-Splicing Rate for HTT Gene

[0646] The 5′ trans-splicing rate (%) for HTT exon 1 were assessed using cargos that bind to intron 1 and a guide targeting the terminal end of the cargo hybridization, or a scrambled NT sequence combined on a single plasmid (FIG. 59A). The wildtype disCas7-11 nuclease was compared against constructs with a direct (no intervening linker) or indirect (XTEN linker intervening) fusion to various splicing proteins (RMB17, SF3B6, U2AF1, or U2AF2) at their N- or C-terminals, as well as constructs generated through rounds of mutagenesis of disCas7-11 that show higher catalytic activity.

### Materials and Method

[0647] The constructs were transfected at a 96-well scale on HEK293FT cells in DMEM 10% FBS. For endogenous splicing experiments, transfections were carried out using:
[0648] 10 ng of guide;
[0649] 10 ng of cargo plasmid; and
[0650] 40 ng of Cas7-11 plasmid,
   co-transfected using Lipofectamine 3000.

[0651] RNA was harvested 3 days post-transfection and reverse transcribed using the Thermo RevertAid cDNA prep kit with gene specific reverse transcription primers binding within the inserted or wildtype downstream exons. Two rounds of PCR were run using amplicon primers binding upstream and downstream of the targeted splicing junction and loaded on an Illumina MiSeq for sequencing. Following sequencing, raw reads were analyzed by searching for counts of the wildtype and trans-product splicing junctions and a percentage was calculated.

### Discussion

[0652] Fusions of splicing related proteins, such as the various members of the spliceosome, to the Cas7-11 effector can provide an orthogonal (not cleavage dependent) mechanism for increasing trans-splicing rates. This fusion approach is analogous to how CRISPR-based technologies such as Prime editing or CRISPR activation gain efficiency through recruitment or delivery of relevant factors with the major effector.

[0653] In this example, several fusions of spliceosome proteins increase trans-splicing rates relative to the wildtype Cas7-11. Similarly, improvements to catalytic activity of the disCas7-11 improve overall trans-splicing rates, suggesting that intron cleavage is a rate-limiting factor for trans-splicing. These improvements further scale with the single vector versions of the HTT constructs, where guides and cargos are cloned into a single plasmid. However, the improvement seen with single vector constructs from nuclease engineering is less pronounced than with the two-vector equivalent, potentially indicating a saturation or rate-limiting step being resolved by the single vectors.

### Example 57. 5′ Trans-Splicing Rate for HTT Gene

[0654] The 5′ trans-splicing rates (%) for HTT gene were assessed (FIG. 59B). Trans-splicing editing rates are plotted for a set of constructs that include Cas7-11 mutants, mutants fused to splicing proteins, and “small” cas7-11 constructs with internal truncations with mutations or fusions. This figure reports a 5′ splicing rate for HTT exon 1, using cargos that bind to intron 1 and a guide targeting the terminal end of the cargo hybridization or a scrambled NT sequence. The wildtype disCas7-11 nuclease is compared here against constructs with a direct fusion to various splicing proteins (RMB17, SF3B6, U2AF1, or U2AF2) at their N- or C-terminals, as well as constructs generated through rounds of mutagenesis of disCas7-11 that show higher catalytic activity.

[0655] These results show modest improvements to splicing rates from each of the orthogonal and combined engineering strategies on top of the “small” Cas7-11 chassis. In some aspects, the overall performance of the small Cas7-11 is lower than the full-length Cas7-11 constructs compared here.

[0656] All constructs were transfected at a 96-well scale on HEK293FT cells in DMEM 10% FBS. For endogenous splicing experiments, transfections were carried out using
[0657] 10 ng of guide
[0658] 10 ng of cargo plasmid
[0659] 40 ng of Cas7-11 plasmid
   co-transfected using Lipofectamine 3000.

[0660] RNA was harvested 3 days post-transfection and reverse transcribed using the Thermo RevertAid cDNA prep kid with gene specific reverse transcription primers binding within the inserted or wildtype downstream exons. Two rounds of PCR were run using amplicon primers binding upstream and downstream of the targeted splicing junction and loaded on an Illumina MiSeq for sequencing. Following sequencing, raw reads were analyzed by searching for counts of the wildtype and trans-product splicing junctions and a percentage was calculated.

### Example 58. 5′ Trans-Splicing Rate for USF1 Gene

[0661] The 5′ trans-splicing rates (%) for USF1 exon 9 were assessed using cargo constructs with hybridization regions that bind intron 9 of the USF1 premRNA and either a scrambled guide or a guide that binds and cleaves upstream of the hybridization region (FIG. 60). Cargos with different hybridization lengths were tiled across the intron in question and crossed with an array of guides cleaving at different positions within the intron.

### Materials and Methods

[0662] The constructs were transfected at a 96-well scale on HEK293FT cells in DMEM 10% FBS. For endogenous splicing experiments, transfections were carried out using:
[0663] 10 ng of guide;
[0664] 10 ng of cargo plasmid; and
[0665] 40 ng of Cas7-11 plasmid,
   co-transfected using Lipofectamine 3000.

[0666] RNA was harvested 3 days post-transfection and reverse transcribed using the Thermo RevertAid cDNA prep kit with gene specific reverse transcription primers binding within downstream exons. Two rounds of PCR were run using amplicon primers binding upstream and downstream of the targeted splicing junction and loaded on an Illumina MiSeq for sequencing. Following sequencing, raw reads were analyzed by searching for counts of the wildtype and trans-product splicing junctions and a percentage was calculated.

### Discussion

[0667] The results from this example suggest a present but inefficient trans-splicing rate in a guide-and-cargo dependent fashion for a terminal intron of USF1. Specific cargos show a larger overall rate and ratio of background activity (where guide 6 represents a nontargeting guide, or no Cas7-11 condition).

[0668] These results suggest that cas7-11 is also able to enhance 5′ splicing rates by removing upstream cis exons, or through binding the transcript, although the overall rates are lower relative to those accomplished through 3′ trans-splicing.

### Example 59. 5′ and 3′ Trans-Splicing Rates for HTT and SHANK3 Genes Respectively

[0669] The 5′ trans-splicing rates (%) for the gene HTT (FIG. 61A) and 3′ trans-splicing rate (%) for the gene SHANK3 (FIG. 61B) were assessed. The rate for the HTT gene was probed using cargo constructs with hybridization regions that bind intron 1 of the HTT premRNA and either a scrambled guide or a guide that binds and cleaves the end of the hybridization. The rate for the SHANK3 exon 21 was probed with a cargo and guide binding within intron 20. Cargo and guide constructs were expressed either from a normal plasmid (single vector) or a subcloned AAV backbone construct. Splicing rate was reported for both Cas7-11 and a truncated Cas7-11 subcloned into an AAV expression backbone.

### Materials and Methods

[0670] The constructs were transfected at a 96-well scale on HEK293FT cells in DMEM 10% FBS. For endogenous splicing experiments, transfections were carried out using:
[0671] 10 ng of guide;
[0672] 10 ng of cargo plasmid; and
[0673] 40 ng of Cas7-11 plasmid,
   co-transfected using Lipofectamine 3000.

[0674] RNA was harvested 3 days post-transfection and reverse transcribed using the Thermo RevertAid cDNA prep kit with gene specific reverse transcription primers binding within downstream exons. Two rounds of PCR were run using amplicon primers binding upstream and downstream of the targeted splicing junction and loaded on an Illumina MiSeq for sequencing. Following sequencing, raw reads were analyzed by searching for counts of the wildtype and trans-product splicing junctions and a percentage was calculated.

### Discussion

[0675] This example tests constructs to be used for an AAV packaging system for trans-splicing, either for 5′ trans-splicing of HTT or 3′ trans-splicing of SHANK3. The truncated Cas7-11 necessary for AAV packaging performs less than the full length cas7-11 wt, which reflect equivalent results from other comparisons of full length and truncated nucleases. Furthermore, the AAV single vector with guide and cargo performs less for HTT editing, but still retains ˜60% of the original editing rate for SHANK3.

[0676] It is likely that the smaller constructs needed for AAV delivery of trans-splicing components can reduce splicing efficiency. However, the degree to which can be variable and related to specific genes.

### Example 60. 5′ Trans-Splicing Rate for PABPC1 Gene

[0677] The 5′ trans-splicing rates (%) for PABPC1 exon 1 were assessed using cargo constructs with hybridization regions that bind intron 1 of the PABPC1 premRNA and either a scrambled guide or a guide that binds and cleaves the end of the hybridization (FIG. 62).

### Materials and Methods

[0678] The constructs were transfected at a 96-well scale on HEK293FT cells in DMEM 10% FBS. For endogenous splicing experiments, transfections were carried out using:
[0679] 10 ng of guide;
[0680] 10 ng of cargo plasmid; and
[0681] 40 ng of Cas7-11 plasmid,
   co-transfected using Lipofectamine 3000.

[0682] RNA was harvested 3 days post-transfection and reverse transcribed using the Thermo RevertAid cDNA prep kit with gene specific reverse transcription primers binding within downstream exons. Two rounds of PCR were run using amplicon primers binding upstream and downstream of the targeted splicing junction and loaded on an Illumina MiSeq for sequencing. Following sequencing, raw reads were analyzed by searching for counts of the wildtype and trans-product splicing junctions and a percentage was calculated.

### Discussion

[0683] In this example, the Cas7-11 serves to cleave the 3′ end of the 5′ trans-splicing cargo, effectively removing any trailing sequences from the plasmid, specifically the polyA tail. This has a beneficial effect on splicing rates, potentially due to a decrease in nuclear export and translation of the un-spliced cargo.

[0684] Together with results from other targets, these results show that polyA removal is important for 5′ trans-splicing.

### Example 61. 5′ Trans-Splicing Rate for RPL41 Gene

[0685] The 5′ trans-splicing rates (%) for RPL41 exon 1 were assessed using cargo constructs with hybridization regions that bind intron 1 of the RPL41 premRNA and either a scrambled guide or a guide that binds and cleaves the end of the hybridization (FIG. 63).

### Materials and Methods

[0686] The constructs were transfected at a 96-well scale on HEK293FT cells in DMEM 10% FBS. For endogenous splicing experiments, transfections were carried out using:
[0687] 10 ng of guide;
[0688] 10 ng of cargo plasmid; and
[0689] 40 ng of Cas7-11 plasmid,
   co-transfected using Lipofectamine 3000.

[0690] RNA was harvested 3 days post-transfection and reverse transcribed using the Thermo RevertAid cDNA prep kit with gene specific reverse transcription primers binding within the downstream exons. Two rounds of PCR were run using amplicon primers binding upstream and downstream of the targeted splicing junction and loaded on an Illumina MiSeq for sequencing. Following sequencing, raw reads were analyzed by searching for counts of the wildtype and trans-product splicing junctions and a percentage was calculated.

### Discussion

[0691] In this example, the Cas7-11 serves to cleave the 3′ end of the 5′ trans-splicing cargo, effectively removing any trailing sequences from the plasmid, in particular the polyA tail. This has a beneficial effect on splicing rates, potentially due to a decrease in nuclear export and translation of the un-spliced cargo.

[0692] Together with results from other targets, these results show that polyA removal is important for 5′ trans-splicing.

### Example 62. 5′ Trans-Splicing Rate for HTT Gene

[0693] The 5′ trans-splicing rates (%) for HTT exon 1 were assessed using the original cargo construct (FIG. 64). Cargo construct was transfected either with a cargo targeting guide, a guide targeting the HTT intron 1, a scrambled (nontargeting) guide, or an RFP plasmid in place of the guide.

### Materials and Methods

[0694] The constructs were transfected at a 96-well scale on HEK293FT cells in DMEM 10% FBS. For endogenous splicing experiments, transfections were carried out using:
[0695] 10 ng of guide;
[0696] 10 ng of cargo plasmid; and
[0697] 40 ng of Cas7-11 plasmid,
   co-transfected using Lipofectamine 3000.

[0698] RNA was harvested 3 days post-transfection and reverse transcribed using the Thermo RevertAid cDNA prep kit with gene specific reverse transcription primers binding within the downstream exons. Two rounds of PCR were run using amplicon primers binding upstream and downstream of the targeted splicing junction and loaded on an Illumina MiSeq for sequencing. Following sequencing, raw reads were analyzed by searching for counts of the wildtype and trans-product splicing junctions and a percentage was calculated.

### Discussion

[0699] This example serves to test how different methods of removing the polyA tail and trailing sequences from a 5′ trans-splicing cargo affect overall rates for HTT. Cargos show good efficiency with cargo cleaving and intron targeting guides, but also moderate activity without a guide present, presently a possibility for reasonable rates without the Cas7-11 constructs.

### Example 63. 5′ Trans-Splicing Rate for HTT Gene

[0700] The 5′ trans-splicing rates (%) for HTT exon 1 were assessed using the original cargo construct (FIG. 65). Cargo construct was transfected either with a cargo targeting guide, a guide targeting the HTT intron 1, a scrambled (nontargeting) guide, or an RFP plasmid in place of the guide. Additional controls where cargos are transfected with no Cas7-11 or catalytically inactive Cas7-11s were also probed.

### Materials and Methods

[0701] The constructs were transfected at a 96-well scale on HEK293FT cells in DMEM 10% FBS. For endogenous splicing experiments, transfections were carried out using:
[0702] 10 ng of guide;
[0703] 10 ng of cargo plasmid; and
[0704] 40 ng of Cas7-11 plasmid,
   co-transfected using Lipofectamine 3000.

[0705] RNA was harvested 3 days post-transfection and reverse transcribed using the Thermo RevertAid cDNA prep kit with gene specific reverse transcription primers binding within the downstream exons. Two rounds of PCR were run using amplicon primers binding upstream and downstream of the targeted splicing junction and loaded on an Illumina MiSeq for sequencing. Following sequencing, raw reads were analyzed by searching for counts of the wildtype and trans-product splicing junctions and a percentage was calculated.

### Discussion

[0706] This example serves to test how different methods of removing the polyA tail and trailing sequences from a 5′ trans-splicing cargo affect overall rates for HTT. Cargos show good efficiency with cargo cleaving and intron targeting guides, but also moderate activity without a guide present, presently a possibility for reasonable rates without the Cas7-11 constructs.

### Example 64. 5′ Trans-Splicing Rate for HTT Gene

[0707] The 5′ trans-splicing rates (%) for HTT exon 1 were assessed using cargos that bind to intron 1 and a guide targeting the terminal end of the cargo hybridization, or a scrambled NT sequence combined on a single plasmid (FIG. 66). The wildtype disCas7-11 nuclease was compared against constructs with a direct (no intervening linker) or indirect (XTEN linker intervening) fusion to various splicing proteins (RMB17, SF3B6, U2AF1, or U2AF2) at their N- or C-terminals, as well as constructs generated through rounds of mutagenesis of disCas7-11 that show higher catalytic activity.

### Materials and Methods

[0708] The constructs were transfected at a 96-well scale on HEK293FT cells in DMEM 10% FBS. For endogenous splicing experiments, transfections were carried out using:
[0709] 10 ng of guide;
[0710] 10 ng of cargo plasmid; and
[0711] 40 ng of Cas7-11 plasmid,
   co-transfected using Lipofectamine 3000.

[0712] RNA was harvested 3 days post-transfection and reverse transcribed using the Thermo RevertAid cDNA prep kit with gene specific reverse transcription primers binding within the inserted or wildtype downstream exons. Two rounds of PCR were run using amplicon primers binding upstream and downstream of the targeted splicing junction and loaded on an Illumina MiSeq for sequencing. Following sequencing, raw reads were analyzed by searching for counts of the wildtype and trans-product splicing junctions and a percentage was calculated.

### Discussion

[0713] Fusions of splicing related proteins, such as the various members of the spliceosome, to the Cas7-11 effector can provide an orthogonal (not cleavage dependent) mechanism for increasing trans-splicing rates. This fusion approach is analogous to how CRISPR-based technologies such as Prime editing or CRISPR activation gain efficiency through recruitment or delivery of relevant factors with the major effector.

[0714] In this example, several fusions of spliceosome proteins increase trans-splicing rates relative to the wildtype Cas7-11. Similarly, improvements to catalytic activity of the disCas7-11 improve overall trans-splicing rates, suggesting that intron cleavage is a rate-limiting factor for trans-splicing. These improvements further scale with the single vector versions of the HTT constructs, where guides and cargos are cloned into a single plasmid. This shows that multiple orthogonal methods for improving efficiency are compatible with each other and can be developed in parallel for a given target, and that the improvements seen for other genes (e.g., STAT3) are generalizable.

### Example 65. 5′ Trans-Splicing Rate for HTT Gene

[0715] The 5′ trans-splicing rates (%) for HTT exon 1 were assessed using a cargo construct with a hybridization region that binds intron 1 of the HTT premRNA (FIG. 67). Cargo and guide constructs were expressed from a normal plasmid (single vector), while nuclease constructs were expressed from normal plasmid or subcloned lentiviral backbone. Shown are splicing rates for triple mutant Cas7-11 and wtCas7-11.

### Materials and Method

[0716] The constructs were transfected at a 96-well scale on HEK293FT cells in DMEM 10% FBS. For endogenous splicing experiments, transfections were carried out using:
[0717] 10 ng of guide;
[0718] 10 ng of cargo plasmid; and
[0719] 40 ng of Cas7-11 plasmid,
   co-transfected using Lipofectamine 3000.

[0720] RNA was harvested 3 days post-transfection and reverse transcribed using the Thermo RevertAid cDNA prep kit with gene specific reverse transcription primers binding within downstream exons. Two rounds of PCR were run using amplicon primers binding upstream and downstream of the targeted splicing junction and loaded on an Illumina MiSeq for sequencing. Following sequencing, raw reads were analyzed by searching for counts of the wildtype and trans-product splicing junctions and a percentage was calculated.

### Discussion

[0721] This example tests several lentiviral expression backbones before lentiviral packaging. Efficient splicing with transient transfection of lentiviral backbone should indicate the potential for efficient splicing post lentiviral production. It was observed that several lenti constructs perform similarly or better than the conventional plasmid Cas7-11, with full length lentiviral constructs still performing more efficiency than the truncated equivalents.

### LIST OF REFERENCES

[0722] All publications and references cited herein are expressly incorporated herein by reference in their entirety.
[0723] U.S. Patent Application Publication No. US2004/0018622.
[0724] International Patent Application Publication No. WO2005/070023A2.
[0725] European Patent Application Publication No. EP2151248A1.
[0726] Anzalone A V, Koblan L W, Liu D R. Genome editing with CRISPR-Cas nucleases, base editors, transposases and prime editors. Nature Biotechnology 2020:824-44. https://doi.org/10.1038/s41587-020-0561-9.
[0727] Soppe J A, Lebbink R J. Antiviral Goes Viral: Harnessing CRISPR/Cas9 to Combat Viruses in Humans. Trends Microbiol 2017; 25:833-50.
[0728] Abudayyeh O O, Gootenberg J S, Essletzbichler P. RNA targeting with CRISPR-Cas13. Nature 2017.
[0729] Smargon A A, Cox D B T, Pyzocha N K, Zheng K, Slaymaker I M, Gootenberg J S, et al. Cas13b Is a Type VI-B CRISPR-Associated RNA-Guided RNase Differentially Regulated by Accessory Proteins Csx27 and Csx28. Mol Cell 2017; 65:618-630.e7.
[0730] Konermann S, Lotfy P, Brideau N J, Oki J, Shokhirev M N, Hsu P D. Transcriptome Engineering with RNA-Targeting Type VI-D CRISPR Effectors. Cell 2018; 0: https://doi.org/10.1016/j.cell.2018.02.033.
[0731] Cox D B T, Gootenberg J S, Abudayyeh O O, Franklin B, Kellner M J, Joung J, et al. RNA editing with CRISPR-Cas13. Science 2017; 358:1019-27.
[0732] Wilson C, Chen P J, Miao Z, Liu D R. Programmable m6A modification of cellular RNAs with a Cas13-directed methyltransferase. Nat Biotechnol 2020. https://doi.org/10.1038/s41587-020-0572-6.
[0733] Abudayyeh O O, Gootenberg J S, Konermann S, Joung J, Slaymaker I M, Cox D B T, et al. C2c2 is a single-component programmable RNA-guided RNA-targeting CRISPR effector. Science 2016; 353:aaf5573.
[0734] Meeske A J, Nakandakari-Higa S, Marraffini L A. Cas13-induced cellular dormancy prevents the rise of CRISPR-resistant bacteriophage. Nature 2019. https://doi.org/10.1038/s41586-019-1257-5.
[0735] Wang Q, Liu X, Zhou J, Yang C, Wang G, Tan Y, et al. The CRISPR-Cas13a Gene-Editing System Induces Collateral Cleavage of RNA in Glioma Cells. Adv Sci 2019; 1:1901299.
[0736] Wang L, Zhou J, Wang Q, Wang Y, Kang C. Rapid design and development of CRISPR-Cas13a targeting SARS-CoV-2 spike protein. Theranostics 2021; 11:649-64.
[0737] Engreitz J, Abudayyeh O, Gootenberg J, Zhang F. CRISPR Tools for Systematic Studies of RNA Regulation. Cold Spring Harb Perspect Biol 2019; 11: https://doi.org/10.1101/cshperspect.a035386.
[0738] Shmakov S, Abudayyeh O O, Makarova K S, Wolf Y I, Gootenberg J S, Semenova E, et al. Discovery and Functional Characterization of Diverse Class 2 CRISPR-Cas Systems. Mol Cell 2015; 60:385-97.
[0739] Shmakov S, Smargon A, Scott D, Cox D, Pyzocha N, Yan W, et al. Diversity and evolution of class 2 CRISPR-Cas systems. Nat Rev Microbiol 2017; 15:169-82.
[0740] Shmakov S A, Faure G, Makarova K S, Wolf Y I, Severinov K V, Koonin E V. Systematic prediction of functionally linked genes in bacterial and archaeal genomes. Nat Protoc 2019. https://doi.org/10.1038/s41596-019-0211-1.
[0741] Pourcel C, Touchon M, Villeriot N, Vernadet J-P, Couvin D, Toffano-Nioche C, et al. CRISPRCasdb a successor of CRISPRdb containing CRISPR arrays and cas genes from complete genome sequences, and tools to download and query lists of repeats and spacers. Nucleic Acids Research 2019. https://doi.org/10.1093/nar/gkz915.
[0742] Edgar R C. PILER-CR: fast and accurate identification of CRISPR repeats. BMC Bioinformatics 2007; 8:18.
[0743] Anantharaman V, Makarova K S, Burroughs A M, Koonin E V, Aravind L. Comprehensive analysis of the HEPN superfamily: identification of novel roles in intra-genomic conflicts, defense, pathogenesis and RNA processing. Biol Direct 2013; 8:15.
[0744] Wang R, Li H. The mysterious RAMP proteins and their roles in small RNA-based immunity. Protein Sci 2012; 21:463-70.
[0745] Makarova K S, Wolf Y I, Iranzo J, Shmakov S A, Alkhnbashi O S, Brouns S J J, et al. Evolutionary classification of CRISPR-Cas systems: a burst of class 2 and derived variants. Nat Rev Microbiol 2019; 18:67-83.
[0746] Harrington L B, Burstein D, Chen J S, Paez-Espino D, Ma E, Witte I P, et al. Programmed DNA destruction by miniature CRISPR-Cas14 enzymes. Science 2018; 362:839-42.
[0747] Ye Y, Zhang Q. Characterization of CRISPR RNA transcription by exploiting stranded metatranscriptomic data. RNA 2016; 22:945-56.
[0748] Zetsche B, Heidenreich M, Mohanraju P, Fedorova I, Kneppers J, DeGennaro E M, et al. Multiplex gene editing by CRISPR-Cpf1 using a single crRNA array. Nat Biotechnol 2017; 35:31-4.
[0749] Ozcan A, Krajeski R, Ioannidi E, Lee B, Gardner A, Makarova K S, et al. Programmable RNA targeting with the single-protein CRISPR effector Cas7-11. Nature 2021. https://doi.org/10.1038/s41586-021-03886-5.
[0750] Marshall R, Maxwell C S, Collins S P, Jacobsen T, Luo M L, Begemann M B, et al. Rapid and Scalable Characterization of CRISPR Technologies Using an E. coli Cell-Free Transcription-Translation System. Mol Cell 2018; 69:146-157.e3.
[0751] Teng F, Li J, Cui T, Xu K, Guo L, Gao Q, et al. Enhanced mammalian genome editing by new Cas12a orthologs with optimized crRNA scaffolds. Genome Biol 2019; 20:15.
[0752] Oakes B L, Fellmann C, Rishi H, Taylor K L, Ren S M, Nadler D C, et al. CRISPR-Cas9 Circular Permutants as Programmable Scaffolds for Genome Modification. Cell 2019; 176:254-267.e16.
[0753] Palazzo A F, Lee E S. Sequence determinants for nuclear retention and cytoplasmic export of mRNAs and lncRNAs. Front Genet 2018; 9:440.

LENGTHY TABLES
The patent application contains a lengthy table section. A copy of the table is available in electronic form from the USPTO web site (https://seqdata.uspto.gov/?pageRequest=docDetail&DocID=US20240100192A1). An electronic copy of the table will also be available from the USPTO upon request and payment of the fee set forth in 37 CFR 1.19(b)(3).

What is claimed:

1. A composition for nucleic acid editing comprising:
a) a trans-splicing template polynucleotide comprising a cargo guide sequence complementary to a portion of an intron or exon sequence of a target RNA sequence, optionally wherein the trans-splicing template polynucleotide further comprises an integration sequence, a 3′ splicing site sequence, a branch point sequence, and a polypyrimidine tract sequence, and wherein each sequence is operably connected in any order; and
b) a Cas7-11 enzyme sequence coupled to a guide RNA sequence that is complementary to a portion of the intron or exon sequence of the target RNA sequence that is upstream, downstream, or overlapping of the portion of the intron or exon sequence that is complementary to the cargo guide sequence.

2. The composition of claim 1, wherein the trans-splicing template polynucleotide comprises a nucleic acid sequence about 80% identical, about 90% identical, about 95% identical, about 99% identical, or identical to any one of the nucleic acid sequences of SEQ ID NOS: 106-171 and 179-184.

3. The composition of claim 1, wherein the Cas7-11 enzyme sequence comprises a nucleic acid sequence about 80% identical, about 90% identical, about 95% identical, about 99% identical, or identical to any one of the nucleic acid sequences of SEQ ID NOS: 1-18.

4. The composition of claim 1, wherein the guide RNA sequence comprises a nucleic acid sequence about 80% identical, about 90% identical, about 95% identical, about 99% identical, or identical to any one of the nucleic acid sequences of SEQ ID NOS: 19-105 and 205-261.

5. A method of editing the target RNA sequence of claim 1 in a cell, the method comprising:
a) providing to the cell the trans-splicing template polynucleotide of claim 1, a vector comprising the trans-splicing template polynucleotide of claim 1, or a particle comprising the trans-splicing template polynucleotide of claim 1;
b) providing to the cell a polynucleotide translating the Cas7-11 enzyme sequence of claim 1, a vector comprising a polynucleotide translating the Cas7-11 enzyme sequence of claim 1, or a particle comprising a polynucleotide translating the Cas7-11 enzyme sequence of claim 1;
c) providing to the cell a polynucleotide expressing the guide RNA sequence of claim 1, a vector comprising a polynucleotide expressing the guide RNA sequence of claim 1, or a particle comprising a polynucleotide expressing the guide RNA sequence of claim 1; and
d) editing the target RNA sequence via 3′ trans-splicing.

6. A method of treating or preventing a genetically inherited disease in a subject in need thereof, the method comprising administering to the subject an effective amount of:
a) the trans-splicing template polynucleotide of claim 1, a vector comprising the trans-splicing template polynucleotide of claim 1, or a particle comprising the trans-splicing template polynucleotide of claim 1;
b) a polynucleotide translating the Cas7-11 enzyme sequence of claim 1, a vector comprising a polynucleotide translating the Cas7-11 enzyme sequence of claim 1, or a particle comprising a polynucleotide translating the Cas7-11 enzyme sequence of claim 1; and
c) a polynucleotide expressing the guide RNA sequence of claim 1, a vector comprising a polynucleotide expressing the guide RNA sequence of claim 1, or a particle comprising a polynucleotide expressing the guide RNA sequence of claim 1.

7. The method of claim 6, wherein the genetically inherited disease is selected from the group consisting of Meier-Gorlin syndrome; Seckel syndrome 4; Joubert syndrome 5; Leber congenital amaurosis 10; Charcot-Marie-Tooth disease, type 2; leukoencephalopathy; Usher syndrome, type 2C; spinocerebellar ataxia 28; glycogen storage disease type III; primary hyperoxaluria, type I; long QT syndrome 2; Sjögren-Larsson syndrome; hereditary fructosuria; neuroblastoma; amyotrophic lateral sclerosis type 9; Kallmann syndrome 1; limb-girdle muscular dystrophy, type 2L; familial adenomatous polyposis 1; familial type 3 hyperlipoproteinemia; Alzheimer's disease, type 1; metachromatic leukodystrophy; cancer; Uveitis; SCA1; SCA2; FUS-Amyotrophic Lateral Sclerosis (ALS); MAPT-Frontotemporal Dementia (FTD); Myotonic Dystrophy Type 1 (DM1); Diabetic Retinopathy (DR/DME); Oculopharyngeal Muscular Dystrophy (OPMD); SCA8; C90RF72-Amyotrophic Lateral Sclerosis (ALS); SOD1-Amyotrophic Lateral Sclerosis (ALS); Spinal Cord Injury (targets: mTOR, PTEN, KLF6/7, SOX11, KCC2, and growth factors); SCA6; SCA3 (Machado-Joseph Disease); Multiple system Atrophy (MSA); Treatment-resistant Hypertension; Myotonic Dystrophy Type 2 (DM2); Fragile X-associated Tremor Ataxia Syndrome (FXTAS); West Syndrome with ARX Mutation; Age-related Macular Degeneration (AMD)/Geographic Atrophy (GA); C90RF72-Frontotemporal Dementia (FTD); Facioscapulohumeral Muscular Dystrophy (FSHD); Fragile X Syndrome (FXS); Huntington's Disease; Glaucoma; Acromegaly; Achromatopsia (total color blindness); Ullrich congenital muscular dystrophy; Hereditary myopathy with lactic acidosis; X-linked spondyloepiphyseal dysplasia tarda; Neuropathic pain (Target: CPEB); Persistent Inflammation and injury pain (Target: PABP); Neuropathic pain (Target: miR-30c-5p); Neuropathic pain (Target: miR-195); Friedreich's Ataxia; Uncontrolled gout; Inflammatory pain (Target: Nav1.7 and Nav1.8); Choroideremia; Focal epilepsy; Alpha-1 Antitrypsin deficiency (AATD); Androgen Insensitivity Syndrome; Opioid-induced hyperalgesia (Target: Raf-1); Neurofibromatosis type 1; Stargardt's Disease; Dravet Syndrome; Retinitis Pigmentosa; and Parkinson's Disease.

8. A composition for nucleic acid editing comprising:
a) a trans-splicing template polynucleotide comprising a cargo guide sequence complementary to a portion of an intron or exon sequence of a target RNA sequence, optionally wherein the trans-splicing template polynucleotide further comprises an integration sequence, a 5′ splicing site sequence, an intronic signal enhancer (ISE) sequence, and/or an exonic signal enhancer (ESE) sequence, wherein each sequence is operably connected in any order; and
b) a Cas7-11 enzyme sequence coupled to a guide RNA sequence that is complementary to a portion of the intron or exon sequence of the target RNA sequence that is upstream, downstream, or overlapping of the portion of the intron or exon sequence that is complementary to the cargo guide sequence.

9. The composition of claim 8, wherein the trans-splicing template comprises a nucleic acid sequence about 80% identical, about 90% identical, about 95% identical, about 99% identical, or identical to any one of the nucleic acid sequences of SEQ ID NOS: 106-171 and 179-184.

10. The composition of claim 8, wherein the Cas7-11 enzyme sequence comprises a nucleic acid sequence about 80% identical, about 90% identical, about 95% identical, about 99% identical, or identical to any one of the nucleic acid sequences of SEQ ID NOS: 1-18.

11. The composition of claim 8, wherein the guide RNA comprises a nucleic acid sequence about 80% identical, about 90% identical, about 95% identical, about 99% identical, or identical to any one of the nucleic acid sequences of SEQ ID NOS: 19-105 and 205-261.

12. A method of editing the target RNA sequence of claim 8 in a cell, the method comprising:
a) providing to the cell the trans-splicing template polynucleotide of claim 8, a vector comprising the trans-splicing template polynucleotide of claim 8, or a particle comprising the trans-splicing template polynucleotide of claim 8;
b) providing to the cell a polynucleotide translating the Cas7-11 enzyme sequence of claim 8, a vector comprising a polynucleotide translating the Cas7-11 enzyme sequence of claim 8, or a particle comprising a polynucleotide translating the Cas7-11 enzyme sequence of claim 8;
c) providing to the cell a polynucleotide expressing the guide RNA sequence of claim 8, a vector comprising a polynucleotide expressing the guide RNA sequence of claim 8, or a particle comprising a polynucleotide expressing the guide RNA sequence of claim 8; and
d) editing the target RNA sequence via 5′ trans-splicing.

13. A method of treating or preventing a genetically inherited disease in a subject in need thereof, the method comprising administering to the subject an effective amount of:
a) the trans-splicing template polynucleotide of claim 8, a vector comprising the trans-splicing template polynucleotide of claim 8, or a particle comprising the trans-splicing template polynucleotide of claim 8;
b) a polynucleotide translating the Cas7-11 enzyme sequence of claim 8, a vector comprising a polynucleotide translating the Cas7-11 enzyme sequence of claim 8, or a particle comprising a polynucleotide translating the Cas7-11 enzyme sequence of claim 8; and
c) a polynucleotide expressing the guide RNA sequence of claim 8, a vector comprising a polynucleotide expressing the guide RNA sequence of claim 8, or a particle comprising a polynucleotide expressing the guide RNA sequence of claim 8.

14. The method of claim 13, wherein the genetically inherited disease is selected from the group consisting of Meier-Gorlin syndrome; Seckel syndrome 4; Joubert syndrome 5; Leber congenital amaurosis 10; Charcot-Marie-Tooth disease, type 2; leukoencephalopathy; Usher syndrome, type 2C; spinocerebellar ataxia 28; glycogen storage disease type III; primary hyperoxaluria, type I; long QT syndrome 2; Sjögren-Larsson syndrome; hereditary fructosuria; neuroblastoma; amyotrophic lateral sclerosis type 9; Kallmann syndrome 1; limb-girdle muscular dystrophy, type 2L; familial adenomatous polyposis 1; familial type 3 hyperlipoproteinemia; Alzheimer's disease, type 1; metachromatic leukodystrophy; cancer; Uveitis; SCA1; SCA2; FUS-Amyotrophic Lateral Sclerosis (ALS); MAPT-Frontotemporal Dementia (FTD); Myotonic Dystrophy Type 1 (DM1); Diabetic Retinopathy (DR/DME); Oculopharyngeal Muscular Dystrophy (OPMD); SCA8; C90RF72-Amyotrophic Lateral Sclerosis (ALS); SOD1-Amyotrophic Lateral Sclerosis (ALS); Spinal Cord Injury (targets: mTOR, PTEN, KLF6/7, SOX11, KCC2, and growth factors); SCA6; SCA3 (Machado-Joseph Disease); Multiple system Atrophy (MSA); Treatment-resistant Hypertension; Myotonic Dystrophy Type 2 (DM2); Fragile X-associated Tremor Ataxia Syndrome (FXTAS); West Syndrome with ARX Mutation; Age-related Macular Degeneration (AMD)/Geographic Atrophy (GA); C90RF72-Frontotemporal Dementia (FTD); Facioscapulohumeral Muscular Dystrophy (FSHD); Fragile X Syndrome (FXS); Huntington's Disease; Glaucoma; Acromegaly; Achromatopsia (total color blindness); Ullrich congenital muscular dystrophy; Hereditary myopathy with lactic acidosis; X-linked spondyloepiphyseal dysplasia tarda; Neuropathic pain (Target: CPEB); Persistent Inflammation and injury pain (Target: PABP); Neuropathic pain (Target: miR-30c-5p); Neuropathic pain (Target: miR-195); Friedreich's Ataxia; Uncontrolled gout; Inflammatory pain (Target: Nav1.7 and Nav1.8); Choroideremia; Focal epilepsy; Alpha-1 Antitrypsin deficiency (AATD); Androgen Insensitivity Syndrome; Opioid-induced hyperalgesia (Target: Raf-1); Neurofibromatosis type 1; Stargardt's Disease; Dravet Syndrome; Retinitis Pigmentosa; and Parkinson's Disease.

15. A system for nucleic acid editing comprising:
a) a trans-splicing template polynucleotide comprising a first cargo guide sequence complementary to a portion of the first intron or exon sequence of a target RNA sequence and a second cargo guide sequence complementary to a portion of the second intron or exon sequence of the target RNA sequence, optionally wherein the trans-splicing template polynucleotide further comprises an integration sequence, a 3′ splicing site sequence, a 5′ splicing site sequence, a branch point sequence, and/or a polypyrimidine tract sequence, wherein each sequence is operably connected in any order; and
b) a first Cas7-11 enzyme sequence coupled to a first guide RNA sequence that is complementary to a portion of the first intron or exon sequence of the target RNA sequence that is upstream, downstream, or overlapping of the portion of the intron sequence that is complementary to the first cargo guide sequence; and
c) optionally a second Cas7-11 enzyme sequence coupled to a second guide RNA sequence that is complementary to a portion of the second intron or exon sequence of the target RNA sequence that is upstream, downstream, or overlapping of the portion of the intron sequence that is complementary to the second cargo guide sequence.

16. The composition of claim 15, wherein the trans-splicing template comprises a nucleic acid sequence about 80% identical, about 90% identical, about 95% identical, about 99% identical, or identical to any one of the nucleic acid sequences of SEQ ID NOS: 106-171 and 179-184.

17. The composition of claim 15, wherein the Cas7-11 enzyme sequence comprises a nucleic acid sequence about 80% identical, about 90% identical, about 95% identical, about 99% identical, or identical to any one of the nucleic acid sequences of SEQ ID NOS: 1-18.

18. The composition of claim 15, wherein the guide RNA comprises a nucleic acid sequence about 80% identical, about 90% identical, about 95% identical, about 99% identical, or identical to any one of the nucleic acid sequences of SEQ ID NOS: 19-105 and 205-261.

19. A method of editing the target RNA sequence of claim 15 in a cell, the method comprising:
a) providing to the cell the trans-splicing template polynucleotide of claim 15, a vector comprising the trans-splicing template polynucleotide of claim 15, or a particle comprising the trans-splicing template polynucleotide of claim 15;
b) providing to the cell a polynucleotide translating the first Cas7-11 enzyme sequence of claim 15, a vector comprising a polynucleotide translating the first Cas7-11 enzyme sequence of claim 15, or a particle comprising a polynucleotide translating the first Cas7-11 enzyme sequence of claim 15;
c) providing to the cell a polynucleotide translating the second Cas7-11 enzyme sequence of claim 15, a vector comprising a polynucleotide translating the second Cas7-11 enzyme sequence of claim 15, or a particle comprising a polynucleotide translating the second Cas7-11 enzyme sequence of claim 15;
d) providing to the cell a polynucleotide expressing the guide RNA sequence of claim 15, a vector comprising a polynucleotide expressing the guide RNA sequence of claim 15, or a particle comprising a polynucleotide expressing the guide RNA sequence of claim 15; and
e) editing the target RNA sequence via internal trans-splicing.

20. A method of treating or preventing a genetically inherited disease in a subject in need thereof, the method comprising administering to the subject an effective amount of:
a) the trans-splicing template polynucleotide of claim 15, a vector comprising the trans-splicing template polynucleotide of claim 15, or a particle comprising the trans-splicing template polynucleotide of claim 15;
b) a polynucleotide translating the first Cas7-11 enzyme sequence of claim 15, a vector comprising a polynucleotide translating the first Cas7-11 enzyme sequence of claim 15, or a particle comprising a polynucleotide translating the first Cas7-11 enzyme sequence of claim 15;
c) a polynucleotide translating the second Cas7-11 enzyme sequence of claim 15, a vector comprising a polynucleotide translating the second Cas7-11 enzyme sequence of claim 15, or a particle comprising a polynucleotide translating the second Cas7-11 enzyme sequence of claim 15; and
d) a polynucleotide expressing the guide RNA sequence of claim 15, a vector comprising a polynucleotide expressing the guide RNA sequence of claim 15, or a particle comprising a polynucleotide expressing the guide RNA sequence of claim 15.

21. The method of claim 20, wherein the genetically inherited disease is selected from the group consisting of Meier-Gorlin syndrome; Seckel syndrome 4; Joubert syndrome 5; Leber congenital amaurosis 10; Charcot-Marie-Tooth disease, type 2; leukoencephalopathy; Usher syndrome, type 2C; spinocerebellar ataxia 28; glycogen storage disease type III; primary hyperoxaluria, type I; long QT syndrome 2; Sjögren-Larsson syndrome; hereditary fructosuria; neuroblastoma; amyotrophic lateral sclerosis type 9; Kallmann syndrome 1; limb-girdle muscular dystrophy, type 2L; familial adenomatous polyposis 1; familial type 3 hyperlipoproteinemia; Alzheimer's disease, type 1; metachromatic leukodystrophy; cancer; Uveitis; SCA1; SCA2; FUS-Amyotrophic Lateral Sclerosis (ALS); MAPT-Frontotemporal Dementia (FTD); Myotonic Dystrophy Type 1 (DM1); Diabetic Retinopathy (DR/DME); Oculopharyngeal Muscular Dystrophy (OPMD); SCA8; C90RF72-Amyotrophic Lateral Sclerosis (ALS); SOD1-Amyotrophic Lateral Sclerosis (ALS); Spinal Cord Injury (targets: mTOR, PTEN, KLF6/7, SOX11, KCC2, and growth factors); SCA6; SCA3 (Machado-Joseph Disease); Multiple system Atrophy (MSA); Treatment-resistant Hypertension; Myotonic Dystrophy Type 2 (DM2); Fragile X-associated Tremor Ataxia Syndrome (FXTAS); West Syndrome with ARX Mutation; Age-related Macular Degeneration (AMD)/Geographic Atrophy (GA); C90RF72-Frontotemporal Dementia (FTD); Facioscapulohumeral Muscular Dystrophy (FSHD); Fragile X Syndrome (FXS); Huntington's Disease; Glaucoma; Acromegaly; Achromatopsia (total color blindness); Ullrich congenital muscular dystrophy; Hereditary myopathy with lactic acidosis; X-linked spondyloepiphyseal dysplasia tarda; Neuropathic pain (Target: CPEB); Persistent Inflammation and injury pain (Target: PABP); Neuropathic pain (Target: miR-30c-5p); Neuropathic pain (Target: miR-195); Friedreich's Ataxia; Uncontrolled gout; Inflammatory pain (Target: Nav1.7 and Nav1.8); Choroideremia; Focal epilepsy; Alpha-1 Antitrypsin deficiency (AATD); Androgen Insensitivity Syndrome; Opioid-induced hyperalgesia (Target: Raf-1); Neurofibromatosis type 1; Stargardt's Disease; Dravet Syndrome; Retinitis Pigmentosa; and Parkinson's Disease.

The application's sequence listing, which the Patent Office published only in electronic form, follows.

SEQUENCE LISTING (611 sequences)

SEQ ID NO: 1 - protein, 1601 aa, synthetic construct
MTTTMKISIEFLEPFRMTKWQESTRRNKNNKEFVRGQAFARWHRNKKDNTKGRPYITGTLLRSAVIRSAENLLTLSDGKISEKTCCPGKFDTEDKDRLLQLRQRSTLRWTDKNPCPDNAETYCPFCELLGRSGNDGKKAEKKDWRFRIHFGNLSLPGKPDFDGPKAIGSQRVLNRVDFKSGKAHDFFKAYEVDHTRFPRFEGEITIDNKVSAEARKLLCDSLKFTDRLCGALCVIRFDEYTPAADSGKQTENVQAEPNANLAEKTAEQIISILDDNKKTEYTRLLADAIRSLRRSSKLVAGLPKDHDGKDDHYLWDIGKKKKDENSVTIRQILTTSADTKELKNAGKWREFCEKLGEALYLKSKDMSGGLKITRRILGDAEFHGKPDRLEKSRSVSIGSVLKETVVCGELVAKTPFFFGAIDEDAKQTDLQVLLTPDNKYRLPRSAVRGILRRDLQTYFDSPCNAELGGRPCMCKTCRIMRGITVMDARSEYNAPPEIRHRTRINPFTGTVAEGALFNMEVAPEGIVFPFQLRYRGSEDGLPDALKTVLKWWAEGQAFMSGAASTGKGRFRMENAKYETLDLSDENQRNDYLKNWGWRDEKGLEELKKRLNSGLPEPGNYRDPKWHEINVSIEMASPFINGDPIRAAVDKRGTDVVTFVKYKAEGEEAKPVCAYKAESFRGVIRSAVARIHMEDGVPLTELTHSDCECLLCQIFGSEYEAGKIRFEDLVFESDPEPVTFDHVAIDRFTGGAADKKKFDDSPLPGSPARPLMLKGSFWIRRDVLEDEEYCKALGKALADVNNGLYPLGGKSAIGYGQVKSLGIKGDDKRISRLMNPAFDETDVAVPEKPKTDAEVRIEAEKVYYPHYFVEPHKKVEREEKPCGHQKFHEGRLTGKIRCKLITKTPLIVPDTSNDDFFRPADKEARKEKDEYHKSYAFFRLHKQIMIPGSELRGMVSSVYETVTNSCFRIFDETKRLSWRMDADHQNVLQDFLPGRVTADGKHIQKFSETARVPFYDKTQKHFDILDEQEIAGEKPVRMWVKRFIKRLSLVDPAKHPQKKQDNKWKRRKEGIATFIEQKNGSYYFNVVTNNGCTSFHLWHKPDNFDQEKLEGIQNGEKLDCWVRDSRYQKAFQEIPENDPDGWECKEGYLHVVGPSKVEFSDKKGDVINNFQGTLPSVPNDWKTIRTNDFKNRKRKNEPVFCCEDDKGNYYTMAKYCETFFFDLKENEEYEIPEKARIKYKELLRVYNNNPQAVPESVFQSRVARENVEKLKSGDLVYFKHNEKYVEDIVPVRISRTVDDRMIGKRMSADLRPCHGDWVEDGDLSALNAYPEKRLLLRHPKGLCPACRLFGTGSYKGRVRFGFASLENDPEWLIPGKNPGDPFHGGPVMLSLLERPRPTWSIPGSDNKFKVPGRKFYVHHHAWKTIKDGNHPTTGKAIEQSPNNRTVEALAGGNSFSFEIAFENLKEWELGLLIHSLQLEKGLAHKLGMAKSMGFGSVEIDVESVRLRKDWKQWRNGNSEIPNWLGKGFAKLKEWFRDELDFIENLKKLLWFPEGDQAPRVCYPMLRKKDDPNGNSGYEELKDGEFKKEDRQKKLTTPWTPWA

SEQ ID NO: 2 - protein, 1637 aa, synthetic construct
MKRTADGSEFESPKKKRKVTTTMKISIEFLEPFRMTKWQESTRRNKNNKEFVRGQAFARWHRNKKDNTKGRPYITGTLLRSAVIRSAENLLTLSDGKISEKTCCPGKFDTEDKDRLLQLRQRSTLRWTDKNPCPDNAETYCPFCELLGRSGNDGKKAEKKDWRFRIHFGNLSLPGKPDFDGPKAIGSQRVLNRVDFKSGKAHDFFKAYEVDHTRFPRFEGEITIDNKVSAEARKLLCDSLKFTDRLCGALCVIRFDEYTPAADSGKQTENVQAEPNANLAEKTAEQIISILDDNKKTEYTRLLADAIRSLRRSSKLVAGLPKDHDGKDDHYLWDIGKKKKDENSVTIRQILTTSADTKELKNAGKWREFCEKLGEALYLKSKDMSGGLKITRRILGDAEFHGKPDRLEKSRSVSIGSVLKETVVCGELVAKTPFFFGAIDEDAKQTDLQVLLTPDNKYRLPRSAVRGILRRDLQTYFDSPCNAELGGRPCMCKTCRIMRGITVMDARSEYNAPPEIRHRTRINPFTGTVAEGALFNMEVAPEGIVFPFQLRYRGSEDGLPDALKTVLKWWAEGQAFMSGAASTGKGRFRMENAKYETLDLSDENQRNDYLKNWGWRDEKGLEELKKRLNSGLPEPGNYRDPKWHEINVSIEMASPFINGDPIRAAVDKRGTDVVTFVKYKAEGEEAKPVCAYKAESFRGVIRSAVARIHMEDGVPLTELTHSDCECLLCQIFGSEYEAGKIRFEDLVFESDPEPVTFDHVAIDRFTGGAADKKKFDDSPLPGSPARPLMLKGSFWIRRDVLEDEEYCKALGKALADVNNGLYPLGGKSAIGYGQVKSLGIKGDDKRISRLMNPAFDETDVAVPEKPKTDAEVRIEAEKVYYPHYFVEPHKKVEREEKPCGHQKFHEGRLTGKIRCKLITKTPLIVPDTSNDDFFRPADKEARKEKDEYHKSYAFFRLHKQIMIPGSELRGMVSSVYETVTNSCFRIFDETKRLSWRMDADHQNVLQDFLPGRVTADGKHIQKFSETARVPFYDKTQKHFDILDEQEIAGEKPVRMWVKRFIKRLSLVDPAKHPQKKQDNKWKRRKEGIATFIEQKNGSYYFNVVTNNGCTSFHLWHKPDNFDQEKLEGIQNGEKLDCWVRDSRYQKAFQEIPENDPDGWECKEGYLHVVGPSKVEFSDKKGDVINNFQGTLPSVPNDWKTIRTNDFKNRKRKNEPVFCCEDDKGNYYTMAKYCETFFFDLKENEEYEIPEKARIKYKELLRVYNNNPQAVPESVFQSRVARENVEKLKSGDLVYFKHNEKYVEDIVPVRISRTVDDRMIGKRMSADLRPCHGDWVEDGDLSALNAYPEKRLLLRHPKGLCPACRLFGTGSYKGRVRFGFASLENDPEWLIPGKNPGDPFHGGPVMLSLLERPRPTWSIPGSDNKFKVPGRKFYVHHHAWKTIKDGNHPTTGKAIEQSPNNRTVEALAGGNSFSFEIAFENLKEWELGLLIHSLQLEKGLAHKLGMAKSMGFGSVEIDVESVRLRKDWKQWRNGNSEIPNWLGKGFAKLKEWFRDELDFIENLKKLLWFPEGDQAPRVCYPMLRKKDDPNGNSGYEELKDGEFKKEDRQKKLTTPWTPWAKRTADGSEFESPKKKRKV

SEQ ID NO: 3 - protein, 1812 aa, synthetic construct
MHTILPIHLTFLEPYRLAEWHAKADRKKNKRYLRGMSFAQWHKDKDGIGKPYITGTLLRSAVLNAAEELISLNQGMWAKEPCCNGKFETEKDKPAVLRKRPTIQWKTGRPAICDPEKQEKKDACPLCMLLGRFDKAGKRHRDNKYDKHDYDIHFDNLNLITDKKFSHPDDIASERILNRVDYTTGKAHDYFKVWEVDDDQWWQFTGTITMHDDCSKAKGLLLASLCFVDKLCGALCRIEVTGNNSQDENKEYAHPDTGIITSLNLKYQNNSTIHQDAVPLSGSAHDNDEPPVHDNDSSLDNDTITLLSMKAKEIVGAFRESGKIEKARTLADVIRAMRLQKPDIWEKLPKGINDKHHLWDREVNGKKLRNILEELWRLMNKRNAWRTFCEVLGNELYRCYKEKTGGIVLRFRTLGETEYYPEPEKTEPCLISDNSIPITPLGGVKEWIIIGRLKAETPFYFGVQSSFDSTQDDLDLVPDIVNTDEKLEANEQTSFRILMDKKGRYRIPRSLIRGVLRRDLRTAFGGSGCIVELGRMIPCDCKVCAIMRKITVMDSRSENIELPDIRYRIRLNPYTATVDEGALFDMEIGPEGITFPFVFRYRGEDALPRELWSVIRYWMDGMAWLGGSGSTGKGRFALIDIKVFEWDLCNEEGLKAYICSRGLRGIEKEVLLENKTIAEITNLFKTEEVKFFESYSKHIKQLCHECIINQISFLWGLRSYYEYLGPLWTEVKYEIKIASPLLSSDTISALLNKDNIDCIAYEKRKWENGGIKFVPTIKGETIRGIVRMAVGKRSGDLGMDDHEDCSCTLCTIFGNEHEAGKLRFEDLEVVEEKLPSEQNSDSNKIPFGPVQDGDGNREKECVTAVKSYKKKLIDHVAIDRFHGGAEDKMKFNTLPLAGSFEKPIILKGRFWIKKDIVKDYKKKIEDAMVDIRDGLYPIGGKTGIGYGWVTDLTILNPQSGFQIPVKKDISPEPGTYSTYPSHSTPSLNKGHIYYPHYFLAPANTVHREQEMIGHEQFHKEQKGELLVSGKIVCTLKTVTPLIIPDTENEDAFGLQNTYSGHKNYQFFHINDEIMVPGSEIRGMISSVYEAITNSCFRVYDETKYITRRLSPEKKDESNDKNKSQDDASQKIRKGLVKKTDEGFSIIEVERYSMKTKGGTKLVDKVYRLPLYDSEAVIASIQFEQYGEKNEKRNAKIRAAIKRNEVIAEVARKNLIFLRSLTPEELKKVLQGEILVKFSLKSGKNPNDYLAELHENGTERGLIKFTGLNMVNIKNVNEEDKDFNDTWDWEKLNIFHNAHEKRNSLKQGYPRPVLKFIKDRVEYTIPKRCERIFCIPVKNTIEYKVSSKVCKQYKDVLSDYEKNFGHINKIFTTKIQKRELTDGDLVYFIPNEGADKTVQAIMPVPLSRITDSRTLGERLPHKNLLPCVHEVNEGLLSGILDSLDKKLLSIHPEGLCPTCRLFGTTYYKGRVRFGFANLMNKPKWLTERENGCGGYVTLPLLERPRLTWSVPSDKCDVPGRKFYIHHNGWQEVLRNNDITPKTENNRTVEPLAADNRFTFDVYFENLREWELGLLCYCLELEPGMGHKLGMGKPMGFGSVKIAIERLQTFTVHQDGINWKPSENEIGVYVQKGREKLVEWFTPSAPHKNMEWNGVKHIKDLRSLLSIPGDKPTVKYPTLNKDAEGAISDYTYERLSDTKLLPHDKRVEYLRTPWSPWNAFVKEAEYSPSEKSDEKGRETIRTKPKSLPSVKSIGKVKWFDEGKGFGILIMDDGKEVSISKNSIRGNILLKKGQKVTFHIVQGLIPKAEDIEIAK

SEQ ID NO: 4 - protein, 1548 aa, synthetic construct
MTKIPISLTFLEPFRLVDWVSESERDKSEFLRGLSFARWHRIKNQREDENQGRPYITGTLLRSAVIKAAEELIFLNGGKWQSEECCNGQFKGSKAKYRKVECPRRRHRATLKWTDNTCSDYHNACPFCLLLGCLKPNSKENSDIHFSNLSLPNKQIFKNPPEIGIRRILNRVDFTTGKAQDYFYVWEVEHSMCPKFQGTVKINEDMPKYNVVKDLLISSIQFVDKLCGALCVIEIGKTKNYICQSFSSNIPEEEIKKLAQEIRDILKGEDALDKMRVLADTVLQMRTKGPEIVNELPRGIEKKGGHWLWDKLRLRKKFKEIANNYKDSWQELCEKLGNELYISYKELTGGIAVKKRIIGETEYRKIPEQEISFLPSKAGYSYEWIILGKLISENPFFFGKETKTEEQIDMQILLTKDGRYRLPRSVLRGALRRDLRLVIGSGCDVELGSKRPCPCPVCRIMRRVTLKDARSDYCKPPEVRKRIRINPLTGTVQKGALFTMEVAPEGISFPFQLRFRGEDKFHDALQNVLVWWKEGKLFLGGGASTGKGRFKLEIEHVLKWDLKNNFHSYLQYKGLRDKGDFNSIKEIEGLKVETEEFKVKKPFPWSCVEYTIFIESPFVSGDPVEAVLDSSNTDLVTFKKYKLEESKEVFAIKGESIRGVFRTAVGKNEGKLTTENEHEDCTCILCRLFGNEHETGKVRFEDLELINDSAPKRLDHVAIDRFTGGAKEQAKFDDSPLIGSPDSPLEFTGIVWVRDDIDEEEKKALKSAFLDIKSGYYPLGGKKGVGYGWVSNLKIESGPEWLRLEVQEKSSQENVLSPVILSEVMDIEFNPPKIDENGVYFPYAFLRPLNEVKRTREPIGHNEWKKSLISGYLTCRLELLTPLIIPDTSEEVIKEKVNNGEHPVYKFFRLGGHLCIPAAEIRGMISSVYEALTNSCFRVFDEKRLISWRMTAEEAKRPDPKKSEEQNRMRFRPGRIIKKDKKFYAQEMLELRIPVYDNKDKRNEISQNDPTRPSEYNHPTEPERIFFSNAEKIRNFLKRNSNYLHGSTPLLFRQWSISNRYDKIALIGNKSQGHLKFTGPNKIEVSEGTKCPKYETIPGRDEWDKAVHNYVEPGKFVTVISRKKGQKPKAVQRRRNVPAFCCYDYNTNRCFVMNKRCERVFKVSRDKPKYEIPPDAIRRYEHVLRKYRENWERYDIPEVFRTRLPGDGETLNEGDLVYFRLDENNRVLDIIPVSISRISDTQYLGRRLPDHLRSCVRECLYEGWGDCKPCKLSLFPEKMWIRINPEGLCPACHLFGTQVYKGRVRFGFARAGSNWKFREEQLTLPRFETPRPTWVIPKRKDEYQIPGRKFYLHHNGWEEIYKKNKKNEIKKEKNNATFEVLKQGTFYFKVFFENLELWELGLLIFSAELGGEEFAHKLGHGKALGFGSVKISVDKIILRRDPGQFEQRGQKFKRDAVDKGFCVLENRFGKTNFKIYLNNFLQLLYWPNNKKVKVRYPYLRQEDDPEKLPGYVELKKHQMLKDDNRYSLFARPRAVWLKWTEMVQRDKS

SEQ ID NO: 5 - protein, 1528 aa, synthetic construct
MKSIPITLTFLEPYRILPWAEKGKRDKKEYLRGANYVRLHKDKNGKFKPYITGTLIRSAVLSAIEMLLDITNGEWNGKECCLAKFHTEGEKPSFLRKKPIYIRAEKDEICTSRETACPLCLILGRFDKAEKKEKDKEKFDVHFSNLNLYSSKEFSTIEELAPKRALNRIEQYTGKAQDYFTVYEALNKEFWTFKGRIRIKEDIYDKVTDLLFSALRCVEKIAGALCRIEIDKEPSQQKGFVKRQLSKQAKEDIEKIFQVVKDAQKLRLLSDCFRELTRMANKDELALPLGPEDDGHYLWDKIKVEGKTLRIFLRNCFSQYKDNWLCFCDEASKKGYQKYREKRHKLTDRELPTATPKHFAEKKDPQISPIYIDKDDKVYEWIIVGRLIAQTPFHFGDEEKAEGAILLTPDNRFRLPRTALRGILRRDLKLAGASACEVEVGRSEPCPCDVCKIMRRVTLLDTVSEDLRDFLPELRKRIRINPQSGTVAEGALFDTEVGPEGLSFPFVLRYKCEKLPDSLTTVLCWWQEGLAFLSGESATGKGRFRLEINGAFVWDLQKGLFNYIKNHGFRGEERLFLEGNEAELEKMGIQINTELLQPEMIKKEKNFTDFPYDLIKYQLNISSPLLLNDPIRAIALYEGEGKAPDAVFFKKYVFENGKIEEKPCFKAESIRGIFRTAVGRIKNVLTKNHEDCICVLCHLFGNVHETGRLKFEDLKIVSGQEEKFFDHVAIDRFLGGAKEKYKFDDKPIIGAPDTPIVLEGKIWVKKDINDEAKETLSQAFSDINTGIYYLGANGSIGYGWIEEVKALKAPSWLKIKEKPNFEKDTSLNISAIMNEFKKDIQTLNLDKTYLPYGFLKLLEKVKRTSSPITHERFYENHLTGFIECSLKVLSPLIIPDTETPEKEENGHKYYHFLKIDNKPIIPGAEIRGAVSSIYEALTNSCFRVFGEKKVLSWRMEGKDAKEFMPGRVSKKKGKLYMVKMQALRLPVYDNPALANEIRSGSIYEKYKNSKVEIIFFQTVEGIRKFLRGNFNNVEWKKVLVTGIDPLAILPSQKIPGNDKWVKNLQSKISPVRGYFKFTGPNKIETKRREEEKDEKLRTKANKVSCLQKDKWYEAMHNHVEYKQDYTPPNSPKTEPLERPRNIPCFVCSDKEKIYRMTKRCERVFVSLGENAPKYEIPISAIKRYEVILSAYRENWERNKTPELFRTRLPGDGRTLNEDDLVYFRADENEKVKDIIPVCISRIVDEVPLIKRLSQELWPCVLAECPLLGFECKKCELEGLPEKIWFRINKDGLCPACRLFGTQIYKSRVRFSFAYAKNWKFYDGYITLPRLESPRATWLILKEKDKHYIKYKVCGRKFYLHNSTYEDIINNSKKEKEKKTENNASFEVLKEGEFTFKVYFENLENWELGLLLLSLTGLGEAIKIGHAKPLGFGSVKIEAKKIYFREEAGKFHPCEKADEYLKKGLNKLTSWFGKNEINEHMRNLLLFMTYYQNLPKVKYPDFDGYAKWRCSYVEQDKVEYFQNRWIVAS

SEQ ID NO: 6 - protein, 1368 aa, synthetic construct
MASEDDDTPTLRKVLKDEINGQEDMWRKFCEALGNSLYDLSKKAKERKRTEALPRLLGETEIYGLPMRENKEDEPLPSSLTYKFKWLIAGELRAETPFFFGTEVQEGQTSATILLNRDGYFRLPRSVIRGALRRDLRLVMGNDGCNMPIGGQMCECGVCRVMRHIVIEDGLSDCKIPPEVRHRIRLNCHTGTVEEGALFDMETGYQGMTFPFRLYCETENSDLDSYLWEVLNNWQNGQSLFGGDTGTGFGRFELTEPKVFLWNFSKKEKHEAYLLNRGFKGQMPVQDVKTKSFKTKTWFQIHRELDISPKKLPWYSTDYRFNVTSPLISRDPIGAMLDPRNTDAIMVRKTVFCPDPNAKNRPAPATVYMIKGESIRGILRSIVVRNEELYDTDHEDCDCILCRLFGSIHQQGSLRFEDAEVQNSVSDKKMDHVAIDRFTGGGVDQMKFDDYPLPGCPAQPLILEGKFWVKDDIDDESKSALEKAFADFRDGLVSLGGLGAIGYGQIGDFELIGGSADWLNLPKPEENRTDVPCGDRSAQGPEIKISLDADKIYHPHFFLKPSDKNVYRERELVSHAKKKGPDGKSLFTGKITCRLSTEGPVFIPDTDLGEDYFEMQASHKKHKNYGFFRINGNVAIPGSSIRGMISSVFEALTNSCFRVFDQERYLSRSEKPDPTELTKYYPGKVKRDGNKFFILKMKDFFRLPLYDFDFEGEAESLRPNYDEDRNEEENKGKNKNTQKVKNAVEFNIKMAGFAKHNRDFLKKYKEQEIKDIFMGKKKVYFTAGKHKPNEAHDNDKIALLTKGSNKKAEKGYFKFTGPGMVNVKAGVEGEECDFHIDESDPDVYWNMSSILPHNQIKWRPSQKKEYPRPVLKCVKDGTEYVMLKRSEHVFAEASSEDSYPVPGKVRKQFNSISRDNVQNTDHLSSMFQSRRLHDELSHGDLVYFRHDEKRKVTDIAYVRVSRTVDDRPMGKRFKNESLRPCNHVCVEGCDECPDRCKELEDYFSPHPEGLCPACHLFGTTDYKGRVSFGLGWHESNTPKWYMPEDNSQKGSHLTLPLLERPRPTWSMPNKKSEIPGRKFYVHHPWSVDKIRNRQFDPAKEKQPDDVIKPNENNRTVEPLGKGNEFTFEVRFNNLREWELGLLLYSLELEDNMAHKLGMGKALGMGSARIKAEAIELRCESAGQNAELKDKAAFVRKGFEFLEIDKPGENDPMNFDHIRQLRELLWFLPENVSANVRYPMLEKEDDGTPGYTDFIKQEEPSTGKRNPSYLSSEKRRNILQTPWKHWYLIPPFQASAQSETVFEGTVKWFDDKKGFGFIKINDGGKDVFVHHSSIVGTGFKSLNEGDSVAFKMGVGPKGPCAEKVKKIGN

SEQ ID NO: 7 - protein, 1717 aa, synthetic construct
MNITVELTFFEPYRLVEWFDWDARKKSHSAMRGQAFAQWTWKGKGRTAGKSFITGTLVRSAVIKAVEELLSLNNGKWEGVPCCNGSFQTDESKGKKPSFLRKRHTLQWQANNKNICDKEEACPFCILLGRFDNAGKVHERNKDYDIHFSNFDLDHKQEKNDLRLVDIASGRILNRVDFDTGKAKDYFRTWEADYETYGTYTGRITLRNEHAKKLLLASLGFVDKLCGALCRIEVIKKSESPLPSDTKEQSYTKDDTVEVLSEDHNDELRKQAEVIVEAFKQNDKLEKIRILADAIRTLRLHGEGVIEKDELPDGKEERDKGHHLWDIKVQGTALRTKLKELWQSNKDIGWRKFTEMLGSNLYLIYKKETGGVSTRFRILGDTEYYSKAHDSEGSDLFIPVTPPEGIETKEWIIVGRLKAATPFYFGVQQPSDSIPGKEKKSEDSLVINEHTSFNILLDKENRYRIPRSALRGALRRDLRTAFGSGCNVSLGGQILCNCKVCIEMRRITLKDSVSDFSEPPEIRYRIAKNPGTATVEDGSLFDIEVGPEGLTFPFVLRYRGHKFPEQLSSVIRYWEENDGKNGMAWLGGLDSTGKGRFALKDIKIFEWDLNQKINEYIKERGMRGKEKELLEMGESSLPDGLIPYKFFEERECLFPYKENLKPQWSEVQYTIEVGSPLLTADTISALTEPGNRDAIAYKKRVYNDGNNAIEPEPRFAVKSETHRGIFRTAVGRRTGDLGKEDHEDCTCDMCIIFGNEHESSKIRFEDLELINGNEFEKLEKHIDHVAIDRFTGGALDKAKFDTYPLAGSPKKPLKLKGRFWIKKGFSGDHKLLITTALSDIRDGLYPLGSKGGVGYGWVAGISIDDNVPDDFKEMINKTEMPLPEEVEESNNGPINNDYVHPGHQSPKQDHKNKNIYYPHYFLDSGSKVYREKDIITHEEFTEELLSGKINCKLETLTPLIIPDTSDENGLKLQGNKPGHKNYKFFNINGELMIPGSELRGMLRTHFEALTKSCFAIFGEDSTLSWRMNADEKDYKIDSNSIRKMESQRNPKYRIPDELQKELRNSGNGLFNRLYTSERRFWSDVSNKFENSIDYKREILRCAGRPKNYKGGIIRQRKDSLMAEELKVHRLPLYDNFDIPDSAYKANDHCRKSATCSTSRGCRERFTCGIKVRDKNRVFLNAANNNRQYLNNIKKSNHDLYLQYLKGEKKIRFNSKVITGSERSPIDVIAELNERGRQTGFIKLSGLNNSNKSQGNTGTTFNSGWDRFELNILLDDLETRPSKSDYPRPRLLFTKDQYEYNITKRCERVFEIDKGNKTGYPVDDQIKKNYEDILDSYDGIKDQEVAERFDTFTRGSKLKVGDLVYFHIDGDNKIDSLIPVRISRKCASKTLGGKLDKALHPCTGLSDGLCPGCHLFGTTDYKGRVKFGFAKYENGPEWLITRGNNPERSLTLGVLESPRPAFSIPDDESEIPGRKFYLHHNGWRIIRQKQLEIRETVQPERNVTTEVMDKGNVFSFDVRFENLREWELGLLLQSLDPGKNIAHKLGKGKPYGFGSVKIKIDSLHTFKINSNNDKIKRVPQSDIREYINKGYQKLIEWSGNNSIQKGNVLPQWHVIPHIDKLYKLLWVPFLNDSKLEPDVRYPVLNEESKGYIEGSDYTYKKLGDKDNLPYKTRVKGLTTPWSPWNPFQVIAEHEEQEVNVTGSRPSVTDKIERDGKMV

SEQ ID NO: 8 - protein, 1659 aa, synthetic construct
MKITLRFLEPFRMLDWIRPEERISGNKAFQRGLTFARWHKSKADDKGKPFITGTLLRSAVIRAAEHLLVLSKGKVGEKACCPGKFLTETDTETNKAPTMFLRKRPTLKWTDRKGCDPDFPCPLCELLGPGAVGKKEGEAGINSYVNFGNLSFPGDTGYSNAREIAVRRVVNRVDYASGKAHDFFRIFEVDHIAFPCFHGEIAFGENVSSQARNLLQDSLRFTDRLCGALCVIRYDGDIPKCGKTAPLPETESIQNAAEETARAIVRVFHGGRKDPEQAQIDKAEQIQLLSAAVRELGRDKKKVSALPLNHEGKEDHYLWDKKAGGETIRTILKAAAEKEAVANQWRQFCIELSEELYKEAKKAHGGLEPARRIMGDAEFSDKSVPDTVSHSIGISVEKETIIMGTLKAETPFFFGIESKEKKQTDLMLLLDGQNHYRIPRSALRGILRRDIRSVLGTGCNAEVGGRPCLCPVCRIMKNITVMDTRSSTDTLPEVRPRIRLNPFTGSVQEKALFNMEMGTEGIEFPFVLSYRGKKTLPKELRNVLNWWTEGKAFLGGAASTGKSIFQLSDIHAFSSDLSDETARESYLSNHGWRGIMENSIVHESPLEGGAGGCSFGLSDLPKLGWHAEDLKLSDIEKYKPFHRQKISVKITLNSPFLNGDPVRALTEDVADIVSFKKYTQGGEKIIYAYKSESFRGVVRTALGLRNQGNDDITGKKNVPLIALTHQDCECMLCRFFGSEYEAGRLYFEDLTFESEPEPRRFDHVAIDRFTGGAVNQKKFDDRSLVPGKEGFMTLIGCFWMRKDKELSRNEIEELGKAFADIRDGLYPLGAKGSMGYGQVAELSIVDDEDSDDENNPAKLLAESMKNASPSLGTPTSLKKKDAGLSLRFDENADYYPYYFLEPEKSVHRDPVPPGHEEAFRGGLLTGRITCRLTVRTPLIVPNTETDDAFNMKEKAGKKKDAYHKSYRFFTLNRVPMIPGSEIRGMISSVFEALSNSCFRIFDEKYRLSWRMDADVKELEQFKPGRVADDGKRIEEMKEIRYPFYDRTYPERNAQNGYFRWDARISLTDNSMRKMEKDGVPRNVIYKLNTLKNKAYKSEKSFLFDLKNKAGGVGRYKKLVLKHAEVRGGEIPYYSHPTPTDCKLLSLVGPNRQLCRQDTLVQYRIIKHRRGAKPEEDFMFVGTPSENQKGHKENNDHGGGYLKISGPNKIEKENVLTSGVPSVPENMGAVVHNCPPRLVEVTVRCGRKQEEECKRKRLVPEYVCADPEKKVTYTMTKRCERIFLEKSRRIIPFTNDAVDKFEILVKEYRRNAEQQDTPEAFQTILPENGTVNPGDLLYFREEKGKAAEIVPVRISRKVDDRHIGKRIDPELRPCHGEWIEDGDLSKLDAYPAEKKLLTRHPKGLCPACRVFGTGSYKSRVRFGFAALKGTPKWLKEDPAEPSQGKGITLPLLERPRPTWAVLHNDKENSEIPGRKFYVHHNGWKGISEGIHPISGENIEPDENNRTVEVLDKGNRFVFELSFENLEPRELGLLIHSLQLEKGLAHKLGMAKSMGFGSVEIDVESVRVKHRSGEWDYKDGETVDGWIEEGKRGVAAKGKANDLRKLLYLPGEKQNPHVHYPTLKKEKKGDPPGYEDLKKSFREKKLNRRKMLTTLWEPWHK

SEQ ID NO: 9 - protein, 1657 aa, synthetic construct
MLKLKVKITYFQPFRVIPWIKEDDRNSDRNYLRGGTFARWHKDKKDDIHGKPYITGTLLRSALFTEIEKIKIHHSDFIHCCNAIDRTEGKHQPSFLRKRPVYTENKNIQACNKCPLCLIMGRGDDRGEDLKKKKHYNGKHYQNWTVHFSNFDTQATFYWKDIVQKRILNRVDQTCGKAKDFFKVCEVDHIACPTLNGIIRINDEKLSQEEISKIKQLIAVGLAQIESLAGGICRIDITNQNHDDLIKSFFETKPSKILQPNLKESGEERFELAKLELLAEYLTQSFDANQKEQQLRRLADAIRDLRKYSPDYLKDLPKGKKGGRTSIWNKKVADDFTLRDCLKNQKIPNELWRQFCEGLGREVYKISKNISNRSDAKPRLLGETEYAGLPLRKEDEKEYSPTYQNQESLPKTKWIISGELQAITPFYIGHVNKTSHTRSTIFLNMNGQFCIPRSTLRGALRRDLRLVFGDSCNTPVGSRVCYCQVCQIMRCIKFEDALSDVDSPPEVRHRIRLNCHTGVVEEGALFDMETGFQGMIFPFRLYYESKNEIMSQHLYEVLNNWTNGQAFFGGEAGTGFGRFKLLNNEVFLWEIDGEEEDYLQYLFSRGYKGIETDEIKKVADPIKWKTLFTKLEIPPEKIPLTQLNYTLTIDSPLISRDPIAAMLDNRNPDAVMVKKTILVYEQDSSTHKNVPKEVPKYFIKSETIRGLLRSIISRTEIKLEDGKKERIFNLDHEDCDCLQCRLFGNVHQQGILRFEDAEITNKNVSDCCIDHVAIDRFTGGGVEKMKFNDYPLSASPKNCLNLKGSIWITSALKDSEKEALSKALSELKYGYASLGGLSAIGYGRVKELTLEENDIIQLTEITESNLNSQSRLSLKPDVKKELSNNHFYYPHYFIKPAPKEVVRESRLISHVQGHDTEGEFLLTGKIKCRLQTLGPLFIANNDKGDDYFELQHNNPGHLNYAFFRINDHIAIPGASIRGMISSVFETLTHSCFRVMDDKKYLTRRVIPESETTQKRKSGRYQVEESDPDLFPGRVQKKGNKYKIEKMDEIVRLPIYDNFSLVERIREYHYSEECASYVPSVKKAIDYNRMLAQAADSNREFLYNHPEAKSILQGKKEVYYILHKQESKNRGKTKEINPNARYACLTDENTPGSRKGFIKFTGPDMVTVNKELKSKIAPIYDPEWEKDIPDWERSNQESNHKYSFILHNEIEMRSSQKKKYPRPVFICKKNGVEYRMQKRCERIFDFTKEEEKDKEIVIPQKVVSQYNAILKDNKENTETIPGLFNSKMVNKELEDGDLVYFKYKEGKVTELTPVAISRKTDNKPMGKRFPKISINGKMKPNDSLRSCSHTCTEDCDDCPNLCESVKDYFKPHPDGLCPACHLFGTTFYKSRLSFGLAWLENNAKWYISNDFQQKDSKKEKGGKLTLPLLERPRPTWSMPNNNAEVPGRKFYVHHPWSVENIKNNQGNQKDISLKPDSDAIKIKENNRTIEPLGKDNVFNFEISFNNLRDWELGLLLYAIELEDHLAHKLGMAKAFGMGSVKIEIKNLLIKGSINDISKAELIKKGFKKLGIDSLEKDDLSEYLHIKQLREILWFSDKPVGTIEYPKLENKTNSRIPSYTDFVQEKDHETGFKNPKYQNLKSRLHILQNPWNAWWKNEE

SEQ ID NO: 10 - protein, 1573 aa, synthetic construct
MSKTDDKIDIKLTFLEPYRMVNWLENGLRMTDPRYLRGLSFARWHRNKNGKAGRPYITGTLLRSAVIRAAEELLSLNLGKWGKQLCCPGQFETEREMRKNKTFLRRRPTPAWSAETKKEICTTHGSACAFCLLLGRRLHGGKEDVNEDAPGSCRKPVGFGNLSLPFQPTKRQIQDVCKERVLNRVDFRTGKAQDYFRVFEIDHEDWGVYTGEITITEPRVQEMLEASLKFVDTLCGALCRIEIVGSADETKRTTSSKEGCPASTTTRDCSSSENDDTSPEDPVREDLKKIAHVIANAFQNSGNREKVHALADAIRAMRLEESSIINTLPKGKSEKTTEQIEVNKHYLWDEIPVNDTSVRHILIEQWRRWQSKKDDPEWWKFCDFLGECLYKEYKKLTSGIQSRARVMGETEYYGALGMPDKVIPLLKSDKTKEWILVGSLKAETPFFFGLETEQTEEVEHTSLRLVMDKKGRFRIPRSVLRGALRRDMRIAFDSGCDVKLGSPLPCDCSVCQVMRSITIKDSRSEAGKLPQIRHRIRLNPFSGTVDEGALFDIEVAPEGVIFPFVMRYRGEEFPPALLSVIRYWQDGKAWLGGEGATGKGRFALAKDLKMYEWKLEDKSLHAYIDTYGHRGNEHAIGTGQGIDGFRSGSLSDLLSDISKESFRDPLASYHNYLDKRWIKVGYQITIGAPLLSADPIGALLDPNNVDAIVFEKMKLDGDQVKYLPAIKGETIRGIVRTALGKRNNLLAKNDHDDCTCSLCAIFGNENETGKIRFEDLEVYDKDIAKKIDHVAIDRFTGGARDQMKFDTLPLIGSPERPLRLKGLFWMRRDVSPDEKARILLAFLEIREGLYPIGGKTGSGYGWVSDLEFDGDAPEAFKEMNSKRGKQASFKEKISFRYPSGAPKHIQNLKATSFYYPHYFLEPGSKVIREQKMIGHEQYYESYPSGASGEKLLSGRIICSMTTHTPLIVPDTGVIKDPENKHATYDFFQMNNAIMIPGSEIRGMISAVYEAMTNSCFRIFHEKQYLTRRISPEDKELREFIPGIVRIINGDVYIEKAEREYRLPLYDDVHIITNYEELEYEKYIKKNPGREQKIKNAHRFNKNIARIAESNRNYLCSLDRAVRREILSGRKKVNFRLVKVNDNKNPDKEAVELCKTGPLEGLVKFSGLNAVNISNLRPGTAEEGFDAKWDMWSLNIILNRMDVRNSQKKEYPRPALHFNHDGKEYTIPKRCERVFVRAEAGKRAETEGSYKVPRKVQEQYQNILRDYESNIGHIDNTFRTLIENCGLNNGSLVYFKPDNSRKEVVAITPVKISRKTDRLPQGDRFPHTSSDLRPCVRDCLDTEGDIRMLENSPFKRLFHIHPEGLCPACQLFGTTNYRGRVRFGFASLSDGPKWFRKDEGNETCHITLPLLERPRPTWSMPDDTSTIPGRKFYVHHMGYETVKKNQRTLVKTENNRTVKALDKENEFTFEVFFENLREWELGLLLHCLELEPEMGHKLGMGKPLGFGSVKIRIDKLQKCVVNVKDGCVLWEPEEDKIQHYIAKGLGKLTTWFGKEWDRLEHIQGLRSLQRLLPL

SEQ ID NO: 11 - protein, 1652 aa, synthetic construct
MIINITVKFLGPFRMLEWTDPDNRNRKNREFMRGQAFARWHNSNPQKGSQPYITGTLVRSAVIRSAENLLMLSEGKVGKEKCCPGEFRTENRKKRDAMLHLRQRSTLQWKTDKPLCNGKSLCPICELLGRRIGKTDEVKKKGDFRIHFGNLTPLNRYDDPSDIGTQRTLNRVDYATGKAHDFFKVWEIDHSLLSVFQGKISIADNIGDGATKLLEDSLRFTDRLCGAICVISYDCIENSDGKENGKTGEAAHIMGESDAGKTDAENIANAIADMMGTAGEPEKLRILADAVRALRIGKNTVSQLPLDHEGKENHHLWDIGEGKSIRELLLEKAESLPSDQWRKFCEDVGEILYLKSKDPTGGLTVSQRILGDEAFWSKADRQLNPSAVSIPVTTETLICGKLISETPFFFGTEIEDAKHTNLKVLLDRQNRYRLPRSAIRGVLRRDLRTAFGGKGCNVELGGRPCLCDVCRIMRGITIMDARSEYAEPPEIRHRIRLNPYTGTVAEGALFDMELGPQGLSFDFILRYRGKGKSIPKALRNVLKWWTKGQAFLSGAASTGKGIFRLDDLKYISFDLSDKDKRKDYLDNYGWRNRIEALSLEKMPLDRMNDYAEPLWQKVSVEIEIGSPFLNGDPIRALIEKDGSDIVSFRKYADDSGKEVYAYKAESFRGVVRAALARQHFDKEGKPLDKEGKPLLTLIHQDCECLICRLFGSEHETGRLRFEDLLFDPQPEPMIFDHVAIDRFTGGAVDKKKFDDCSLPGTPGHPLTLKGCFWIRKELEKPDEDKSEREALSKALADIHNGLYPLGGKGAIGYGQVMNLKIKGAGDVIKAALQSESSRMSASEPEHKKPDSGLKLSFDDKKAVYYPHYFLKPAAEEVNRKPIPTGHETLNSGLLTGKIRCRLTTRTPLIVPDTSNDDFFQTGVEGHESYAFFSVNGDIMLPGSEIRGMLSSVYEALTNSCFRVFDEGYRLSWRMEADRNVLMQFKPGRVTDNGLRIEEMKEYRYPFYDRDCSDKKSQEAYFDEWERSITLTDDSLEKMAERKGDISPKDLKVLKSLKGKNYKSTEGLLAAFKDKGGDTGGNILGLIFKYAERIGDVPRYEHPTDTDRMMLSLSEYNRNQKSDGKRAYKIIKPASKLGKGAYFMFAGTSVENKRICNPACTDKANKSVKGYLKISGPNKLEKYNISEPELDGVPEDRNCQIIHNRIYLRKIFVANAKKRKERDRLVGEFACYDPEKKVTYSMTKRCERIFIKDRGRTLPITHEASELFEILVQEYRENAKRQDTPEVFQTLLPDNGRLNPGDLVYFREEKGKTVEIIPVRISRKIDDSPIGKRLREDLRPCHGEWIEGDDLSQLSEYPEKKLFTRNTEGLCPACRLFGTGAYKGRLRFGFAKLENDPKWLMKNSDGPSHGGPLTLPLLERPRPTWSMPDDTLNRLKKDGKQEPKKQKGKKGPQVPGRKFYVHHDGWKEINCGCHPTTKENIVQNQNNRTVEPLDKGNTFSFEICFENLEPYELGLLLYTLELEKGLAHKLGMAKPMGFGSIDIEVENVSLRTDSGQWKDANEQISEWTDKGKKDAGKWFKTDWEAAEHIKNLKKLLFLPGEEQNPRVIYPALKQKDIPNSRLPGYEELKKNLNMEKRKEMLTTPWAPWHPIKK

SEQ ID NO: 12 - protein, 1723 aa, synthetic construct
MTQITIQVTFFHPFRVVPWNHRDHRKTDRKYLRGGTFAKWHCTASEGKSGRPYITGTLLRSALFAEIEKLIAFHDPFKCCRGKDKTENGNAKPLFLRRRPRADCDPCGTCPLCLLMGRSDTVRRDAKKQKKDWSVHFCNLREATERSFNWKETAIERIVNRVDPSSGKAKDYMRIWEIDPLVCSQFNGIITINLDTDNAGKVKLLMAAGLAQINILAGSICRADIISEDHDALIKQFMAIDVREPEVSTSFPLQDDELNNAPAGCGDDEISTDQPVGHNLVDRVRISKIAESIEDVFSQEQKAQQLRRMADAIRDLRRSKPDETTLDALPKGKTDKDNSVWDKPLKKDILPSPRMPASEDDDTPTLRKVLKDEINGQEDMWRKFCEALGNSLYDLSKKAKERKRTEALPRLLGETEIYGLPMRENKEDEPLPSSLTYKFKWLIAGELRAETPFFFGTEVQEGQTSATILLNRDGYFRLPRSVIRGALRRDLRLVMGNDGCNMPIGGQMCECGVCRVMRHIVIEDGLSDCKIPPEVRHRIRLNCHTGTVEEGALFDMETGYQGMTFPFRLYCETENSDLDSYLWEVLNNWQNGQSLFGGDTGTGFGRFELTEPKVFLWNFSKKEKHEAYLLNRGFKGQMPVQDVKTKSFKTKTWFQIHRELDISPKKLPWYSTDYRFNVTSPLISRDPIGAMLDPRNTDAIMVRKTVFCPDPNAKNRPAPATVYMIKGESIRGILRSIVVRNEELYDTDHEDCDCILCRLFGSIHQQGSLRFEDAEVQNSVSDKKMDHVAIDRFTGGGVDQMKFDDYPLPGCPAQPLILEGKFWVKDDIDDESKSALEKAFADFRDGLVSLGGLGAIGYGQIGDFELIGGSADWLNLPKPEENRTDVPCGDRSAQGPEIKISLDADKIYHPHFFLKPSDKNVYRERELVSHAKKKGPDGKSLFTGKITCRLSTEGPVFIPDTDLGEDYFEMQASHKKHKNYGFFRINGNVAIPGSSIRGMISSVFEALTNSCFRVFDQERYLSRSEKPDPTELTKYYPGKVKRDGNKFFILKMKDFFRLPLYDFDFEGEAESLRPNYDEDRNEEENKGKNKNTQKVKNAVEFNIKMAGFAKHNRDFLKKYKEQEIKDIFMGKKKVYFTAGKHKPNEAHDNDKIALLTKGSNKKAEKGYFKFTGPGMVNVKAGVEGEECDFHIDESDPDVYWNMSSILPHNQIKWRPSQKKEYPRPVLKCVKDGTEYVMLKRSEHVFAEASSEDSYPVPGKVRKQFNSISRDNVQNTDHLSSMFQSRRLHDELSHGDLVYFRHDEKRKVTDIAYVRVSRTVDDRPMGKRFKNESLRPCNHVCVEGCDECPDRCKELEDYFSPHPEGLCPACHLFGTTDYKGRVSFGLGWHESNTPKWYMPEDNSQKGSHLTLPLLERPRPTWSMPNKKSEIPGRKFYVHHPWSVDKIRNRQFDPAKEKQPDDVIKPNENNRTVEPLGKGNEFTFEVRFNNLREWELGLLLYSLELEDNMAHKLGMGKALGMGSARIKAEAIELRCESAGQNAELKDKAAFVRKGFEFLEIDKPGENDPMNFDHIRQLRELLWFLPENVSANVRYPMLEKEDDGTPGYTDFIKQEEPSTGKRNPSYLSSEKRRNILQTPWKHWYLIPPFQASAQSETVFEGTVKWFDDKKGFGFIKINDGGKDVFVHHSSIVGTGFKSLNEGDSVAFKMGVGPKGPCAEKVKKIGN

SEQ ID NO: 13 - protein, 1720 aa, synthetic construct
MSVEEFYVRLTFLEPFRVVPWVRNGDERKGDRIYQRGGTYARWHKINDSHGQPYITGTMLRSAVLREIENTLTLHNTYGCCPGGTRTTEGKLEKPLYLRRRDGFEFENHAEKPCSEEDPCPLCLIQGRFDKLRRDEKKQFVRQGNISFCSVNFSNLNISSGIKSFSWEEIAVSRVVNRVDPNSGKAKDFFRVWEIDHKLCPNFLGKMSISLSEKLEDVKALLAVGLAQVNVLSGALCRVDIIDPETQKDTVHQHLIQQFVTRIQDKEKGDAADIPAFTLPPAGLSPSSNEWNDTIKSLAEKIRKIKELEQGQKLRQMADVIRELRRKTPAYLDQLPAGKPEGRESIWEKTPTGETLTLRQLLKSANVPGESWRAFCEELGEQLYRLEKNLYSHARPLPRLLGETEFYGQPARKSDDPPMIRASYRAFPSYVWVLDGILRAETPFYFGTETSEGQTSQAIILCPDGSYRLPRSLLRGVIRRDLRAILGTGCNVSLGKVRPCSCPVCEIMRRITVQQGVSSYREPAEVRQRIRSNPHTGTVEEGALFDLETGPQGMTFPFRLYFRTRSPYIDRALWLTINHWQEGKAIFGGDIGVGMGRFRLENLQIRSADLVSRRDFSLYLRARGLKGLSREEVTRIGLNEEQWEAVMADDPGTHYNPFPWEKISYTLLIHSPLISNDPIAAMLDHDNKDAVMVQKTVLFVDESGNYSQMPHHFLKGSGIRGACRFLLGRKDAPNENGLTYFEADHEECDCLLCSLFGSKHYQGKLRFEDAELQDEVEAIKCDHVAIDRFHGGTVHRMKYDDYPLPGSPNRPLRIKGNIWVKRDLSDTEKEAVKDVLTELRDGLIPLGANGGAGYGRIQRLMIDDGPGWLALPERKEDERPQPSFSPVSLGPVHVNLKSGSDTADVYYYHPHYFLEPPSQTVSRELDIISHARTRDSGGEALLTGRILCRLITRGPIFIPDTNNDNAFGLEGGIGHKNYRFFRINDELAIPGSELRGMVSSVYEALTNSCFRIMEEGRYLSRRMGADEFKDFHPGIVVDGAKIREMKRYRLPLYDTPDKTSRTKEMTCPELFTRKDGRPERAKKFNEEIAKVAVQNRAYLLSLDEKERREVLLGNREVTFDECPDDEYSDDEYSELKYAQKYKDFIAVLKKNGQKRGYIKFTGPNTANKKNEDAPDKNYRSDWDPFKLNILLESDPECRVSNIHCYPRPLLVCIKDKAEYRIHKRCEAIFCSIGSPSDLYDIPQKVSNQYRTILQDYNDNTGKIVEIFRTQIKHDQLTTGDLVYFKPAANGQVNAVIPVSISRKTDENPLAKRFKNDSLRPCAGLCVEDCNECPARCKKVADYFNPHPRGLCPACHLFGTTFYKGRVRFGFAWLTGEDGAPRWYKGPDPCDSGKGRPMTIPLLERPRPTWSIPDNSFDIPGRKFYVHHPYSVDGIDGETRTPNNRTIEPLAEGNEFVFDIDFENLRDWELGLLLYSLELEDSLAHKLGLGKPLGFGTVQINIRGISLKNGSKGWDTKTGDDKNQWIKKGFAHLGIDIKEANERPYIKQLRELLWVPTGDNLPHVRYPELESKTKDVPGYTSLLKEKDLADRVSLLKAPWKPWKPWSGTAPHPDKGTNRLRASIVERDRIQRKTDTAKPEKKEETKVGKSSSSDIEKRYVGTVKWFNDKKGYGFILYGTDEEIFVHRSGVADNSIPKEGQKVGFRIERGARGSHAVEVKAIE

SEQ ID NO: 14 - protein, 1610 aa, synthetic construct
MPRFQLSLTFFDEPFRLIEWTDKSNRNSANTQWMRGQGFARWHKITLEKGFPFVTGTAVRSKIIREVEALLSRNKGTWNGIPCCSGFFDTKGPSPTHLRYRPTLEWEYGKTVCTSEADVCPLCLLLGRFDQAGKKSDTPCQSTDYHVHWENLSAGVAQYRLEDIAQKRTSNRVDFFSKKAHDHYGVWEVTAVKNLLGYIYISDAITESHQKTVISLLKAALSFTDTLCGANCKLELSDEPVDSIHSNQSASNFNPHSGAAPSQCSQSMPPFNMDQETKELANTLCKAFTGNMRHLRTLADAVREMRRMSPGISSLPRGRLNKEGEITAHYLWDERIDEKTIRQVLEDTIELSPARSIIYKNWISFCNQLGQKLYERAKDNDPILERKRPLGEAAFSKVPTSSHAPRHDMNSRVKGGFTREWIIVGTLRALTPFYMGTGSQAGKQTSMPTLQDSNDHFRLPRTALRGALRRDINQASDGMGCVVELGPHNLCSCPVCQVLRQIRLLDTKSKFSMPPAIRQKICKNPVLSIVNEGSLFDVELGIEGETFPFVMRYRGGAKIPDTIITVLSWWKNERLFIGGESGTGRGRFVLECPRIFCWDVEKGQNDYIQYHGFRNKEDELLSVYSTVSGLAEKNDVNLNNARDFSFDKICWEVQFDGPVLTGDPLAALFHGNTDSVFYKKPILKSGEKEPSYQWAIKSDTVRGLIRSAFGKRDALLIKSHEDCDCLLCEAFGSKHHEGKLRFEDLTPKSDEIKTYRMDHVAIDRISGGAVDQCKYDDEPLVGTSKHPLVFKGMFWINRDSSVEMQRALIAAFKEIRDGLYPLGSNGGTGYGWISHLAITNGPDWLNLEEVPLPQPTADIPVEECTAEPYPKFQKPDLDQNAVYYPHYFLQPGKPAERERHPVSHDHIDDKLLTGRLVCTLTTKTPLIIPDTQTNTMLPPNDAPEGHKSFRFFRIDDEVLIPGSEIRGMVSTVFEALTGSCFRVINQKAHLSWRINADMAKHYRPGRIIQNNEKMFIQPYKMFRLPFYAGFDPRNCLSEKQLLGIEPVKLWVKDFVASLVKPQTDIDIEWKEKIGFVRVTGPNKVEVDSSNTPDPSLPECESDWKDIHITEDGSTPSKNDRVYRCQLKGVTYTVAKWCEAFWVKDEGKKPITVNAEAINRYHLIMKSYQDNPQSPPIIFRSLPVLNYKQDQKIIGSMIFYRESAKSDKIVNEIIPVKISRTADTELLAKHLPNNDFLPCAATCLNECDTCNAKTCKFLPLYREGYPVNGLCPSCHLFGTTGYQGRVRFGFAKMNGNAKFCQGGERPEDRAVTLPLQERPKLTWVMPNENSTIPGRKFFLHHQGWKKIVDEGKNPINGDVIEPDANNRTVEPLAAGNDFSFEVFFENLREWELGLLRYTLELESELAHKLGMGKAFGFGSVKIKIKSVDLRKQGEWEKATNTLVSEDKKSSWYNIHTVNNLRTALYYVEDDKIQVNYPKLKKDNESDNRPGYVEMKKTAFPVRDILTTPWWPWWPPTPPPMNQSGNQSYARSEEPARITESQPEVYKTGTVKFYKHDKKFGFITMDGRENIHFAGNQICRPETSLQSGDKVKFIEGENYKGPTALKVERLKG

SEQ ID NO: 15 - protein, 1575 aa, synthetic construct
MRLKINIHFLEPFRLIEWHEQDRRNKGNSRWQRGQSFARWHRRKDNDQGRPYITGTLLRSVVIRAVEEELARPDTAWQSCGGLFITPDGQTKPQHLRHRATVRARQTAKDKCADRQSACPFCLLLGRFDQVGKDGDKKGEGLRFDVRFSNLDLPKDFSPRDFDGPQEIGSRRTINRVDDETGKAHDFFSIWEVDAVREFQGEIVLAADLPSRDQVESLLHHALGFVDRLCGARCVISIADQKPAEREERTVAAGDEKATIADYDQVKGLPYTRLRPLADAVRNLRQLDLAELNKPDGKFLPPGRVNKDGRRVPHYVWDIPLGKGDTLRKRLEFLAASCEGDQAKWRNICESEGQALYEKSKKLKDSPAAPGRHLGAAEQVRPPQPPVSYSEESINSDLPLAEWIITGTLRAETPFAIGMDAPIDDDQTSSRTLVDRDGRYRLPRSTLRGILRRDLSLASGDQGCQVRLGPERPCTCPVCLILRQVVIADTVSETTVPADIRQRIRRNPITGTAADGGLFDTERGPKGAGFPFSLRYRGHAPMPKALRTVLQWWSAGKCFAGSDGGVGCGRFALDNLEVYRWDLGTFAFRQAYSENNGLRSPEEEFDLAVIHELAEGLAKEDGQKILKGTEPFTCWQERSWQFSFTGPLLQGDPLAALNSDTADIISFRRTVVDNGEVLREPVLRGEGLRGLLRTAVGRVAGDDLLTRSHQDCKCEICQLFGSEHRAGILRFEDLPPVSPTTVADKRLDHVAIDRFDQSVVEKYDDRPLVGSPKQPLVFKGCFWVQTSGMTHQLTELLAQAWRDIAAGHYPVGGKGGIGYGWINSLVVDGEKITCRPDGDSISLTTVTGDIPPRPALTPPAGAIYYPHYFLPPNPEHKPKRSDKIIGHHTFATDPDSFTGRITCKLEVVTPLIVPDTEGEQPKDQHKNFPFFKINDEIMLPGAPLWAAVSQVYEALTNSCFRVMKQKRFLSWRMEAEDYKDFYPGRVLDGGKQIKKMGDKAIRMPLYDDSTATGSIKDDQLISDCCPKSDEKLQKALATNQKIALAAKHNQEYLAQLSPDEREEALQGLKKVSFWTESLANNEAPPFLIAKLGEERGKPKRAGYLKITGPNNANIANTNNPDDGGYIPSWKDQFDYSFRLLGPPRCLPNTKGNREYPRPGFTCVIDGKEYSLTKRCERIFEDISGGENQVVRAVTERVREQYREILASYRANAAGIAEGFRTRMYDTEELRENDLVYFKTAKQADGKERVVAISPVCISREADDRPLGKRLPAGFQPCSHVCLEDCNTCSAKNCPVPLYREGWPVNGLCPACRLFGAQMYKGRVNFGFARLPDDKQPETKTLTLPLLERPRPTWVLPKSVKGSNTEDATIPGRKFYLRHDGWRIVMAGTNPITGESIEKTANNATVEAIMPGATFTFDIVCENLDQQELGLLLYSLELEEGMSHTLGRGKPLGFGNVRIKVEKIEKRLSDGSRREMIPPKGAGLFMTDKVQDALRGLTEGGDWHQRPHISGLRRLLTRYPEIKARYPKLSQGEDKEPGYIELKSQKDENGVPIYNPNRELRVSENGPLPWFLLAKK

SEQ ID NO: 16 - protein, 1801 aa, synthetic construct
MIPDLRSLVVHISFLTPYRQAPWFPPEKRRNNNRDWLRMQSYARWHKVAPEEGHPFITGTLLRSRVIRAVEEELCLANGIWRGVACCPGEFNSQAKKKPKHLRRRTTLQWYPEGAKSCSKQDGRENACPFCLLLDRFGGEKSEEGRKKNNDYDVHFSNLNPFYPGSSPKVWSGPEEIGRLRTLNRIDRLTTKAQDFFRIYEVDQVRDFFGTITLAGDLPRKVDVEFLLRRGLGFVSTLCGAQCEIKVVDLKKKQNNKEDSILPVSEVPFFLEPEVLAKMCQDVFPSGKLRMLADVILRLREEGPDNLTLPMGSQGLGGRLPHHLWDVPLVSKDRETQTLRSCLEKIAAQCKSEQTQFRLFCQKLGSSLFRINKGVYLAPNSKISPEPCLDPSKTIRTKGPVPGKQKHRFSLLPPFEWIITGTLKAQTPFFIPDEQGSHDHTSRKILLTRDFYYRLPRSLLRGIIRRDLHEATDKGGCRVELAPDVPCTCQVCRLLGRMLLADTTSTTKVAPDMRHRVGVDRSCGIVRDGALFDTEYGIEGVCFPLEIRYRGNKDLEGPIRQLLSWWQQGLLFLGGDFGIGKGRFRLENMKIHRWDLRDESARADYVQKCGLRRGVGDDTAINLEKDLSLNLPESGYPWKKHAWKLSFQVPLLTADPIMAQTRHEEDSVYFQKRIFTSDGRVVLVPALRGEGLRGLLRTAVSRAYGISLINDEHEDCDCPLCKIFGNEHHAGMLRFDDMVPVGTWNDKKIDHVSCSRFDASVVNKFDDRSLVGSPDSPLHFEGTFWLHRDFQNDVEIKTALQDFADGLYSIGGKGGIGYGWLFDMEIPRSLRKLNSGFREASSIQDALLDSAKEIPLSAPLTFTPVKGAVYNPYYYLPFPAEKPERCLVPPSHARLQSDRYTGCLTCELETVSPLLLPDTCREKDGNYKEYPSFRLNNTPMIPGAGLRAAVSQVYEVLTNSCIRIMDQGQTLSWRMSTSEHKDYQPGKITDNGRKIQPMGKQAIRLPLYDEVIHHVSTPGDTDDLEKLKAIVLELTRPWKELPEEQKKKRFEKCKNILDGRMLQQKELRALENSGFAYWRDKTSLTFDSFLKDAIEQEYPRYSGDYQRIKALVVNITLPWKLLKKEERHKRFDKCRRILKGQQPLTKDERKALEESGFANWHGRELLFDRFLKDENSCLIKAETTDRVIASVAKNNRDYLFEIKQQDFARYKRIIQGLERVPFSLRSLAKSKETSFQIACLGLRRGRFLRKGYLKISGPNNANVEISGGSHSNSGYSDIWDDPLDFSFRLSGKSELRPNTQKTREYPRPSFTCTVDGKQYTVNKRCERVFEDSAAPAIELPRMVREGYKGILTDYEQNAKHIPQGFQTRFSSYRELNDGDLVYYKTDSQGRVTDLAPVCLSRLADDRPLGKRLPEEYRPCAHVCLEECDPCTGKDCPVPIYREGYPARGFCPACQLFGTQMYKGRVRFSFGVPVNSTRSPQLKYVTLPSQERPRPTWVLPESCKGKEKDVPGRKFYLRHDGWREMWGDDDKPDSRPSSEECQDIIEGIGPGEKFHFRVAFENLDKNELGRLLYSLELDAGMNHHLGRGKAFGFGQVKIRVTKLERRLEPGQWRSEKICTDLPVTSSELVISSLKKVEERRKLLRLVMTPYKGLTACYPGLERENGRPGYTDLKMLATYDPYRELVVQIGSNQPLRPWYEPGKSFKPSPGNDCTGRGGSVSKSLISEPKVVPAIAPFCEGVVKWFNSVKGFGFIETKEQRDIFVHFSAIRGEGYKILEPGEKVRFEIGEGRKGPQAINVIRIR

SEQ ID NO: 17 - protein, 1329 aa, synthetic construct
MFPKGRQMRRQRLLGDAEYYGGTGREQPASIVISTDSDPDHKVYEWIITGQLKAETGFFFGTKAGAGGHTDLSILLGKDGHYRVPRSVFRGALRRDLRVAFGAGCRVEVGRERPCECPVCKVMRQITVMDTISSYREAPEIRQRIRLNPYTGTVDKGALFDMEVGPEGIEFPFVLRFRGSKSFPSELAAVIGSWTKGTAWLGGAAATGKGRFSLLGLSIHKWNLSTAEGRKSYLAAYGLRDAADKTVKRLSIDKGGKGDVGLPAGLERDALPSSVREPLWKKLVCTVDFSSPLLLADPIAALLGVEGDERIGFDNIAYEKRRYNGETNTTESIPAVKGETFRGIVRTALGKRHGNLTRDHEDCRCRLCAVFGKEQEAGKIRFEDLMPVGAWTRKHLDHVAIDRFHGGAEENMKFDTYALAASPTNPLRMKGLIWVRSDLFETGHDGPTPPYVKDIIDALADVKRGLYPVGGKTGSGYGWIKDVTIDGLPQGLSLPPAEERVDGVNEVPPYNYSAPPDLPSAAEGEYFFPHVFIKPYDKVDRVSRLTGHDRFRQGRITGRITCTLKTLTPLIIPDSEGIQTDATGHKMCKFFSVAGKPMIPGSEIRGMISSVYEALTNSCFRVFDEEKYLTRRVQPKKGAKSSELVPGIIVWGQNGGLAVQQVKNAYRVPLYDDPAVTSAIPTEAQKNKERWESVPSVNLQGALDWNLTTANIARDNRTFLNSRPEEKDAILSGTKPISFELEGTNPNDMLVRLVPDGVDGAHSGYLKFTGLNMVLKANKKTSRKLAPSEEDVRTLAILHNDFDSRRDWRRPPNSQRYFPRSVLRFSLERSTYTIPKRCERVFEGTCGEPYSVPSDVERQYNSIIDDISKNYGRISETYLTKTANRKLTVGDLVYFIADLDKNMATHILPVFISRISDEKPLGELLPFSGKLIPCEGEPPTILKKMAPSLLTEAWRTLISTHLEGFCPACRLFGTTSYKGRIRFGFAEHTGTPKWLREELDWARPFLTLPIQERPRPTWSVPDDKSEVPGRKFYLHHHGGNRIVESNLRNRPEVNQTKNNSSVEPISAGNTFTFDVCFENLEAWELGLLLYCLELSPKLAHKLGRAKAFGFGSVKIHVERIEERTTDGAYQDVTAVKKNGWITTGHDKLREWFHRDDWEDVDHIRNLRTVLRFPDADQEHDVRYPELKANNGVSGYVELRDKMTASERQESLRTPWYRWFPQNGTGGSGRHEQAATSQEQDTAKDESVLSATQRRQAVIDVSDPDERLSGTVESFDRQKGDGYIGCGVRQFYVRLEDIRSRTALCEGQVVTFRARKEWEGHEAYDVEIDQ

SEQ ID NO: 18 - protein, 1403 aa, synthetic construct
  VARIANT 1394: note = Any amino acid
  VARIANT 1395: note = Any amino acid
  VARIANT 1396: note = Any amino acid
MTKKPGTEDKATLWGKESASKSVKTILEESIQGFTVEQKRSFFANLADQLVSRAGEQGAKSVRSQGLIIGRKENYAKPSAQEPTRHHLYRQPSNASAFLATGWLIAETPFFIGSGTEGQKQTDDQAESLHLRTLRDGHGRFRIPFTTIRGVMDKELRDILQAGCAKGRSLRAPCPCQVCTLMRRIQVRDAIAADILPPDLRMRTRIDPSHGTVAHLFSLEMAPQGLKLPFFLKLKGVETIDPDKELLEILNDWSAGQCFLGGLWGTGKGRFRLDDLQWHRLELDNADYYTPLLQDRFFAGETISDLRQGLQSINIQPERIPAQTPSRNMPYCRVDCILEFKSPVLSGDPVAALFESDAPDNVAYKKPVVQYDETGRLRTTDPGPVEMLTCLKGEGVRGVVAYLAGKAYDQHDLSHDSCNCTFCQAFGNGQKAGSLRFDDFMPVQFESDQAGNFSWSPHTPHAMRSDRVALDVFGGAMPEAKFDDRPLAASPGKPLNFKSTIWYREDMGKEAGKALKRALIDLQNNMAAIGSGGGIGRGWVSRVCFEGDIPDFLEDFPEPITVTEPEQDSQLLKNQAVADETAVSACDTADAPHPLAVTLEPGARYFPRVIIPRAPTVKRDECVTGQRYHTGRLSGKIFCELNTLGPLFVPDTDYSAGVPVPISDEQLAECQLQAVFENTSKFNEFFATYPEETVTKLKDLLCAADDKWILAVKDITADLRQEIGEDTFQRIIRKAGHKTQRFHQINDEIGLPGASLRGMVLSNYQILTNSCYRNLKATEEITRRMPADEAKYRKAGRVTVSGDGAQKKYSIQEMEVLRLPIYDNMNTPDNMPDVAKQATTAKRCNNLMNEAAKTSRVELKARWREGQSKIKYQIIDALNKVDPIIQVISSSKQINPNNGKTGWGYVKYTGANVFAKSLVAPIDCLRKKDAGHVCCQVNLNPAWEASNFDILINEKCPVERQSGPRPTLRCKGQDSAWYTLTKRSERIFTDKKPVPDPINIPPREVKRYNELRDSYKKNTAHVPKPLQTFFNQESLANGDLVYFEVNQFGEASQLTPVSISRTTDLFPIGGRLPQGHKDLFPCTAMCLSECKNCVPASFCEFHSRSHEKLCPACSLAGTTGNRGRIKFSEAWLSGLPKWHSVSQDNVGRGLGVTMPRLERSRRTWHLPTKDAYLLGQSIYLNHPVPAILPSDQVPSENNQTVEPLGPKNIFSFQLAFDNLSIEELGLLLYSLELESGMAHRLGRGRALGMGSVQISVKDIQIRDNKSFLFSSNISKKSEWIQCGKDEFAQEAWFGESWDNIDHIQRLRQALTIPVKGDVGCIRYPKLEAEGGMPDYIKLRKRLTPLCDREEPVRYRINPVQLARMILPFVPWHGACPALLNEQVMIEAKRLTELXXXDRANWPC

SEQ ID NO: 19 - DNA, 47 bp, synthetic construct
  source 1..47: mol_type = other DNA
gttgatgtcacggaacggccgtggccagcaacttcgcggtgagtgac

SEQ ID NO: 20 - DNA, 47 bp, synthetic construct
  source 1..47: mol_type = other DNA
gttgatgtcacggaacgtgagtgacgggaggatggcgctctgagcac

SEQ ID NO: 21 - DNA, 47 bp, synthetic construct
  source 1..47: mol_type = other DNA
gttgatgtcacggaactctgagcacagcacagcccttgagcagtgac

SEQ ID NO: 22 - DNA, 47 bp, synthetic construct
  source 1..47: mol_type = other DNA
gttgatgtcacggaacagcagtgaccctcctatagaacactatctgg

SEQ ID NO: 23 - DNA, 47 bp, synthetic construct
  source 1..47: mol_type = other DNA
gttgatgtcacggaacactatctgggctgtgattccacagtgctggg

SEQ ID NO: 24 - DNA, 47 bp, synthetic construct
  source 1..47: mol_type = other DNA
gttgatgtcacggaacagtgctgggcccgtgagcaggctgggagctc

SEQ ID NO: 25 - DNA, 47 bp, synthetic construct
  source 1..47: mol_type = other DNA
gttgatgtcacggaactgggagctctgcggctctccttctgctagaa

SEQ ID NO: 26 - DNA, 47 bp, synthetic construct
  source 1..47: mol_type = other DNA
gttgatgtcacggaacctgctagaacctgcccccagactcttggcta

SEQ ID NO: 27 - DNA, 47 bp, synthetic construct
  source 1..47: mol_type = other DNA
gttgatgtcacggaactcttggctatgatcctgtgaccccaagaccg

SEQ ID NO: 28 - DNA, 47 bp, synthetic construct
  source 1..47: mol_type = other DNA
gttgatgtcacggaacccaagaccgccatgcaggtcatgagctcttt

SEQ ID NO: 29 - DNA, 47 bp, synthetic construct
  source 1..47: mol_type = other DNA
gttgatgtcacggaacgagctctttgtgtcagtccattttgtataac

SEQ ID NO: 30 - DNA, 47 bp, synthetic construct
  source 1..47: mol_type = other DNA
gttgatgtcacggaacttgtataaccccttccctgctgtcagcggtg

SEQ ID NO: 31 - DNA, 47 bp, synthetic construct
  source 1..47: mol_type = other DNA
gttgatgtcacggaactcagcggtgactctgtgacttctgggcgggg

SEQ ID NO: 32 - DNA, 47 bp, synthetic construct
  source 1..47: mol_type = other DNA
gttgatgtcacggaactgggcggggactgagctgtatgacttccaat

SEQ ID NO: 33 - DNA, 47 bp, synthetic construct
  source 1..47: mol_type = other DNA
gttgatgtcacggaacacttccaattccatgtgacctccattccaat

SEQ ID NO: 34 - DNA, 47 bp, synthetic construct
  source 1..47: mol_type = other DNA
gttgatgtcacggaaccattccaatgaagactttgatcatacaaccc

SEQ ID NO: 35 - DNA, 47 bp, synthetic construct
  source 1..47: mol_type = other DNA
gttgatgtcacggaacatacaaccccaaggcagggccaagctgtatc

SEQ ID NO: 36 - DNA, 47 bp, synthetic construct
  source 1..47: mol_type = other DNA
gttgatgtcacggaacagctgtatctgtcctgtttgttttcagggca

SEQ ID NO: 37 - DNA, 47 bp, synthetic construct
  source 1..47: mol_type = other DNA
gttgatgtcacggaacttcagggcagtggagagggcagaggaagtct

SEQ ID NO: 38 - DNA, 47 bp, synthetic construct
  source 1..47: mol_type = other DNA
gttgatgtcacggaacaggaagtctgctaacatgcggtgacgtcgag

SEQ ID NO: 39 - DNA, 47 bp, synthetic construct
  source 1..47: mol_type = other DNA
gttgatgtcacggaacgacgtcgaggagaatcctggcccaatgcccg

SEQ ID NO: 40 - DNA, 47 bp, synthetic construct
  source 1..47: mol_type = other DNA
gttgatgtcacggaaccaatgcccgccatgaagatcgagtgccgcat

SEQ ID NO: 41 - DNA, 47 bp, synthetic construct
  source 1..47: mol_type = other DNA
gttgatgtcacggaacgaaacctccccttgccccataccaggcttac

SEQ ID NO: 42 - DNA, 47 bp, synthetic construct
  source 1..47: mol_type = other DNA
gttgatgtcacggaacaggccctatgacctagacctcaaccctgtag

SEQ ID NO: 43 - DNA, 47 bp, synthetic construct
  source 1..47: mol_type = other DNA
gttgatgtcacggaacaagtcctgtgaccccccaagtcccatagata

SEQ ID NO: 44 - DNA, 47 bp, synthetic construct
  source 1..47: mol_type = other DNA
gttgatgtcacggaaccccaggctccagttaaccccctgacccagca

SEQ ID NO: 45 - DNA, 47 bp, synthetic construct
  source 1..47: mol_type = other DNA
gttgatgtcacggaacctggaggtgacaaagaccatcagtgctagtc

SEQ ID NO: 46 - DNA, 47 bp, synthetic construct
  source 1..47: mol_type = other DNA
gttgatgtcacggaaccagatagaaagtaccctcaatttatcatcaa

SEQ ID NO: 47 - DNA, 47 bp, synthetic construct
  source 1..47: mol_type = other DNA
gttgatgtcacggaactagggctggccgttcctggccgcagcgcccc

SEQ ID NO: 48 - DNA, 47 bp, synthetic construct
  source 1..47: mol_type = other DNA
gttgatgtcacggaacctttttaaacagaaaccttgtatctctctca

SEQ ID NO: 49 - DNA, 47 bp, synthetic construct
  source 1..47: mol_type = other DNA
gttgatgtcacggaacgttaaacaatggaaaagtatttctcctacac

SEQ ID NO: 50 - DNA, 47 bp, synthetic construct
  source 1..47: mol_type = other DNA
gttgatgtcacggaactattggaggagcaactcagaaagctgcatga

SEQ ID NO: 51 - DNA, 47 bp, synthetic construct
  source 1..47: mol_type = other DNA
gttgatgtcacggaacgtaatcacaggcaagttataacatctctaag

SEQ ID NO: 52 - DNA, 47 bp, synthetic construct
  source 1..47: mol_type = other DNA
gttgatgtcacggaactcccaaatgaagggagcaacccaaataaaat

SEQ ID NO: 53 - DNA, 47 bp, synthetic construct
  source 1..47: mol_type = other DNA
gttgatgtcacggaactgtccagacacacacacacacaggctgaagt

SEQ ID NO: 54 - DNA, 47 bp, synthetic construct
  source 1..47: mol_type = other DNA
gttgatgtcacggaactttggcaatgatacaagtaaatctgacccat

SEQ ID NO: 55 - DNA, 47 bp, synthetic construct
  source 1..47: mol_type = other DNA
gttgatgtcacggaactggctcacgcctgtaatgccagcactttgag

SEQ ID NO: 56 - DNA, 47 bp, synthetic construct
  source 1..47: mol_type = other DNA
gttgatgtcacggaacgacccctggctcaggactggggtgcaaggca

SEQ ID NO: 57 - DNA, 47 bp, synthetic construct
  source 1..47: mol_type = other DNA
gttgatgtcacggaacaaaaaagaaaacacaaaagtctgattaacac

SEQ ID NO: 58 - DNA, 47 bp, synthetic construct
  source 1..47: mol_type = other DNA
gttgatgtcacggaacatgtttcatgaacataggcgatgctctatgt

SEQ ID NO: 59 - DNA, 47 bp, synthetic construct
  source 1..47: mol_type = other DNA
gttgatgtcacggaaccagttcccaggccccacttcgtggttctctc

SEQ ID NO: 60 - DNA, 47 bp, synthetic construct
  source 1..47: mol_type = other DNA
gttgatgtcacggaacttccttccttcttctactaagttattttgtt

SEQ ID NO: 61 - DNA, 47 bp, synthetic construct
  source 1..47: mol_type = other DNA
gttgatgtcacggaaccaaaatttttgaagcataccttaacatcttg

SEQ ID NO: 62 - DNA, 47 bp, synthetic construct
  source 1..47: mol_type = other DNA
gttgatgtcacggaacgtcacacagagagagggcgtgtaaataaggc

SEQ ID NO: 63 - DNA, 47 bp, synthetic construct
  source 1..47: mol_type = other DNA
gttgatgtcacggaacaaaaaacactggagttaaggcaagaaaaaga

SEQ ID NO: 64 - DNA, 47 bp, synthetic construct
  source 1..47: mol_type = other DNA
gttgatgtcacggaaccagttcagatatgtgtatcctgaaatattct

SEQ ID NO: 65 - DNA, 47 bp, synthetic construct
  source 1..47: mol_type = other DNA
gttgatgtcacggaacgcctgatttgcaatcagatagagggtcacaa

SEQ ID NO: 66 - DNA, 47 bp, synthetic construct
  source 1..47: mol_type = other DNA
gttgatgtcacggaacagatacttttttgtactgttatattttagag

SEQ ID NO: 67 - DNA, 47 bp, synthetic construct
  source 1..47: mol_type = other DNA
gttgatgtcacggaacgtatccccaagagaaggctccctgttggcca

SEQ ID NO: 68 - DNA, 47 bp, synthetic construct
  source 1..47: mol_type = other DNA
gttgatgtcacggaacgggcgggctgtgtcccctctctgagcctcag

SEQ ID NO: 69 - DNA, 47 bp, synthetic construct
  source 1..47: mol_type = other DNA
gttgatgtcacggaacaaagacaaatgataaatgaaaacaaacaaca

SEQ ID NO: 70 - DNA, 47 bp, synthetic construct
  source 1..47: mol_type = other DNA
gttgatgtcacggaacatcaatatttgctttgccagggaaattttag

SEQ ID NO: 71 - DNA, 47 bp, synthetic construct
  source 1..47: mol_type = other DNA
gttgatgtcacggaacgccccatcctcttccgcttcacccctgcagg

SEQ ID NO: 72 - DNA, 47 bp, synthetic construct
  source 1..47: mol_type = other DNA
gttgatgtcacggaacgaaaacaatgtaattcctagtttccactaca

SEQ ID NO: 73 - DNA, 47 bp, synthetic construct
  source 1..47: mol_type = other DNA
gttgatgtcacggaacacaatttacaaacagataagtttaaaataaa

SEQ ID NO: 74 - DNA, 47 bp, synthetic construct
  source 1..47: mol_type = other DNA
gttgatgtcacggaacagtaaagctatttttaaaaagctacacccag

SEQ ID NO: 75 - DNA, 47 bp, synthetic construct
  source 1..47: mol_type = other DNA
gttgatgtcacggaacatttgtattgtttcagtgtaaaagcacagtg

SEQ ID NO: 76 - DNA, 47 bp, synthetic construct
  source 1..47: mol_type = other DNA
gttgatgtcacggaacgaatagaagggttaaatagaaccgaaatggt

SEQ ID NO: 77 - DNA, 47 bp, synthetic construct
  source 1..47: mol_type = other DNA
gttgatgtcacggaacacccataggcccactgagacaagaggtggtg

SEQ ID NO: 78 - DNA, 47 bp, synthetic construct
  source 1..47: mol_type = other DNA
gttgatgtcacggaacaaatacaataaaatccatttatatggctggg

SEQ ID NO: 79 - DNA, 47 bp, synthetic construct
  source 1..47: mol_type = other DNA
gttgatgtcacggaaccaaaacctcaaaaaagatacatgcaggacct

SEQ ID NO: 80 - DNA, 47 bp, synthetic construct
  source 1..47: mol_type = other DNA
gttgatgtcacggaactctctctctgacccccaccactccagacccc

SEQ ID NO: 81 - DNA, 47 bp, synthetic construct
  source 1..47: mol_type = other DNA
gttgatgtcacggaaccctgatggctgttaattcttgatgagcctgg

SEQ ID NO: 82 - DNA, 47 bp, synthetic construct
  source 1..47: mol_type = other DNA
gttgatgtcacggaacaagaaaagtgacagttgtttcctctgtttct

SEQ ID NO: 83 - DNA, 47 bp, synthetic construct
  source 1..47: mol_type = other DNA
gttgatgtcacggaacgtcaaggtctgcgctccggtgccttcggggg

SEQ ID NO: 84 - DNA, 47 bp, synthetic construct
  source 1..47: mol_type = other DNA
gttgatgtcacggaacaacctgtccacaacttttgtcataaaatttg

SEQ ID NO: 85 - DNA, 47 bp, synthetic construct
  source 1..47: mol_type = other DNA
gttgatgtcacggaacagacattcaagctgaactatcacaattctta

SEQ ID NO: 86 - DNA, 47 bp, synthetic construct
  source 1..47: mol_type = other DNA
gttgatgtcacggaactttgccacttttataattatgcatcattttt

SEQ ID NO: 87 - DNA, 47 bp, synthetic construct
  source 1..47: mol_type = other DNA
gttgatgtcacggaacgcaacagggcaagccaccatagtacaccttc

SEQ ID NO: 88 - DNA, 47 bp, synthetic construct
  source 1..47: mol_type = other DNA
gttgatgtcacggaacaatctgcaaggttcaaactttaaacccaagt

SEQ ID NO: 89 - DNA, 47 bp, synthetic construct
  source 1..47: mol_type = other DNA
gttgatgtcacggaactggggccactcccaactgatgctgccagcca

SEQ ID NO: 90 - DNA, 47 bp, synthetic construct
  source 1..47: mol_type = other DNA
gttgatgtcacggaactacttatcttttactatttctgtgatatatg

SEQ ID NO: 91 - DNA, 47 bp, synthetic construct
  source 1..47: mol_type = other DNA
gttgatgtcacggaacagaaaatataaagtttctgaggagaattcaa

SEQ ID NO: 92 - DNA, 47 bp, synthetic construct
  source 1..47: mol_type = other DNA
gttgatgtcacggaaccctctgccctcagggcctggcctggcggtgt

SEQ ID NO: 93 - DNA, 47 bp, synthetic construct
  source 1..47: mol_type = other DNA
gttgatgtcacggaaccaggactctaagtgggtctgctgtcagcaca

SEQ ID NO: 94 - DNA, 47 bp, synthetic construct
  source 1..47: mol_type = other DNA
gttgatgtcacggaacagaagaaatgaaaagattacagataagaccc

SEQ ID NO: 95 - DNA, 47 bp, synthetic construct
  source 1..47: mol_type = other DNA
gttgatgtcacggaacttgcctccaggcgggcctgggataggggacc

SEQ ID NO: 96 - DNA, 47 bp, synthetic construct
  source 1..47: mol_type = other DNA
gttgatgtcacggaacgttatagcacagtcattagtaacacaaatat

SEQ ID NO: 97 - DNA, 47 bp, synthetic construct
  source 1..47: mol_type = other DNA
gttgatgtcacggaacgtttcccctccctcatcaacaaaagcccacc

SEQ ID NO: 98 - DNA, 47 bp, synthetic construct
  source 1..47: mol_type = other DNA
gttgatgtcacggaacaaaataaaaaacctacacatgaagtaaattt

SEQ ID NO: 99 - DNA, 47 bp, synthetic construct
  source 1..47: mol_type = other DNA
gttgatgtcacggaactgagaggataattatcccatgaaaacagtcc

SEQ ID NO: 100 - DNA, 47 bp, synthetic construct
  source 1..47: mol_type = other DNA
gttgatgtcacggaacaaatgtcacttctgacaacataaccatgaag

SEQ ID NO: 101 - DNA, 47 bp, synthetic construct
  source 1..47: mol_type = other DNA
gttgatgtcacggaacgtcaggctagaaggacagactgcggtcctcc

SEQ ID NO: 102 - DNA, 47 bp, synthetic construct
  source 1..47: mol_type = other DNA
gttgatgtcacggaacgtattatatatacttcttttcagtacatgaa

SEQ ID NO: 103 - DNA, 47 bp, synthetic construct
  source 1..47: mol_type = other DNA
gttgatgtcacggaacacaaaaaaacagaagtaaagaaagatttcct

SEQ ID NO: 104 - DNA, 47 bp, synthetic construct
  source 1..47: mol_type = other DNA
gttgatgtcacggaacaggagactgacagtggccacgcagaaactca

SEQ ID NO: 105 - DNA, 47 bp, synthetic construct
  source 1..47: mol_type = other DNA
gttgatgtcacggaacaaaacaggtaaaataacaaatgcatggaatt

SEQ ID NO: 106 - DNA, 261 bp, synthetic construct
  source 1..261: mol_type = other DNA
ctgtcaaagaaaaaaaaagaagaaatgaaaagattacagataagacccatgaaaaaagaaaagtgacagttgtttcctctgtttctacaaggtatcaatatttgctttgccagggaaattttagccaagcaatgtttcatgaacataggcaacgaggaattctcttcttttttttctgcagtaaaatgcatgaggaacaaatctgcatattttgctgaaaagctctataaatcggactacaaagacgatgacgacaagtaa

SEQ ID NO: 107 - DNA, 261 bp, synthetic construct
  source 1..261: mol_type = other DNA
gaaaaaagaaaagtgacagttgtttcctctgtttctacaaggtatcaatatttgctttgccagggaaattttagccaagcaatgtttcatgaacataggcgatgctctatgtattttcacagatagaaagtaccctcaatttatcatcaaaacgaggaattctcttcttttttttctgcagtaaaatgcatgaggaacaaatctgcatattttgctgaaaagctctataaatcggactacaaagacgatgacgacaagtaa

SEQ ID NO: 108 - DNA, 261 bp, synthetic construct
  source 1..261: mol_type = other DNA
tttgctttgccagggaaattttagccaagcaatgtttcatgaacataggcgatgctctatgtattttcacagatagaaagtaccctcaatttatcatcaagttcctggagaagtaattgataaagtctatcaaagcaaagggtggtatttaacgaggaattctcttcttttttttctgcagtaaaatgcatgaggaacaaatctgcatattttgctgaaaagctctataaatcggactacaaagacgatgacgacaagtaa

SEQ ID NO: 109 - DNA, 253 bp, synthetic construct
  source 1..253: mol_type = other DNA
ctgcagggagagggaggttgcctccaggcgggcctgggataggggacccgaaggggtcaaggtctgcgctccggtgccttcgggggtacccctgccccatcctcttccgcttcacccctgcaggacccagacagttcccaggccccacttaacgaggaattctcttcttttttttctgcaggtcgggggcgcggtgcgcgagatctccggctttgccaccacttatgactacaaagacgatgacgacaagtaa

SEQ ID NO: 110 - DNA, 253 bp, synthetic construct
  source 1..253: mol_type = other DNA
aaggggtcaaggtctgcgctccggtgccttcgggggtacccctgccccatcctcttccgcttcacccctgcaggacccagacagttcccaggccccacttcgtggttctctctttgtcctagggctggccgttcctggccgcagcgccccaacgaggaattctcttcttttttttctgcaggtcgggggcgcggtgcgcgagatctccggctttgccaccacttatgactacaaagacgatgacgacaagtaa

SEQ ID NO: 111 - DNA, 253 bp, synthetic construct
  source 1..253: mol_type = other DNA
cctcttccgcttcacccctgcaggacccagacagttcccaggccccacttcgtggttctctctttgtcctagggctggccgttcctggccgcagcgcccccgctgtggccttagcctgttcaaggcccttctccacccccacatcctgcaaacgaggaattctcttcttttttttctgcaggtcgggggcgcggtgcgcgagatctccggctttgccaccacttatgactacaaagacgatgacgacaagtaa

SEQ ID NO: 112 - DNA, 272 bp, synthetic construct
  source 1..272: mol_type = other DNA
ctgggaaagaaaaaaaagttatagcacagtcattagtaacacaaatatctttcaaaacctgtccacaacttttgtcataaaatttggctgaaagaaaacaatgtaattcctagtttccactacaccaaattttccttccttcttctactaaacgaggaattctcttcttttttttctgcagagagcaaattaaaagagttaaggactctgaagatgtacctatggtcctagtaggaaataaatgtgactacaaagacgatgacgacaagtaa

SEQ ID NO: 113 - DNA, 272 bp, synthetic construct
  source 1..272: mol_type = other DNA
tttcaaaacctgtccacaacttttgtcataaaatttggctgaaagaaaacaatgtaattcctagtttccactacaccaaattttccttccttcttctactagttattttgtttctttacctttttaaacagaaaccttgtatctctctcaaacgaggaattctcttcttttttttctgcagagagcaaattaaaagagttaaggactctgaagatgtacctatggtcctagtaggaaataaatgtgactacaaagacgatgacgacaagtaa

SEQ ID NO: 114 - DNA, 272 bp, synthetic construct
  source 1..272: mol_type = other DNA
aatgtaattcctagtttccactacaccaaattttccttccttcttctactagttattttgtttctttacctttttaaacagaaaccttgtatctctctcaaaagatcaaatacctagaagtatagtaaaactataacctaataggttaataacgaggaattctcttcttttttttctgcagagagcaaattaaaagagttaaggactctgaagatgtacctatggtcctagtaggaaataaatgtgactacaaagacgatgacgacaagtaa

SEQ ID NO: 115 - DNA, 264 bp, synthetic construct
  source 1..264: mol_type = other DNA
ctatagaaaaaaaaaaagtttcccctccctcatcaacaaaagcccaccctctaagagacattcaagctgaactatcacaattcttaatcagttacaatttacaaacagataagtttaaaataaacaatttacaaaatttttgaagcatacaacgaggaattctcttcttttttttctgcagacatttttcagataacatcttctgagtcataaccagcctggcagtatgatggcctagactacaaagacgatgacgacaagtaa

SEQ ID NO: 116 - DNA, 264 bp, synthetic construct
  source 1..264: mol_type = other DNA
ctaagagacattcaagctgaactatcacaattcttaatcagttacaatttacaaacagataagtttaaaataaacaatttacaaaatttttgaagcataccttaacatcttgttttgcagttaaacaatggaaaagtatttctcctacacaacgaggaattctcttcttttttttctgcagacatttttcagataacatcttctgagtcataaccagcctggcagtatgatggcctagactacaaagacgatgacgacaagtaa

SEQ ID NO: 117 - DNA, 264 bp, synthetic construct
  source 1..264: mol_type = other DNA
acaatttacaaacagataagtttaaaataaacaatttacaaaatttttgaagcataccttaacatcttgttttgcagttaaacaatggaaaagtatttctcctacactaaaaaaaaacttgcttacacacaactgaaaatagaatcttacaacgaggaattctcttcttttttttctgcagacatttttcagataacatcttctgagtcataaccagcctggcagtatgatggcctagactacaaagacgatgacgacaagtaa

SEQ ID NO: 118 - DNA, 265 bp, synthetic construct
  source 1..265: mol_type = other DNA
ctaccaaaaaatagagcaaaataaaaaacctacacatgaagtaaatttggtattgtttgccacttttataattatgcatcatttttacaaaacagtaaagctatttttaaaaagctacacccagggagatagtcacacagagagagggcgaacgaggaattctcttcttttttttctgcaggtgataaatctgtatcagatgactccggaaatgtgggaggagagaattactgcttgggactacaaagacgatgacgacaagtaa

SEQ ID NO: 119 - DNA, 265 bp, synthetic construct
  source 1..265: mol_type = other DNA
tattgtttgccacttttataattatgcatcatttttacaaaacagtaaagctatttttaaaaagctacacccagggagatagtcacacagagagagggcgtgtaaataaggcaccattctattggaggagcaactcagaaagctgcatgaaacgaggaattctcttcttttttttctgcaggtgataaatctgtatcagatgactccggaaatgtgggaggagagaattactgcttgggactacaaagacgatgacgacaagtaa

SEQ ID NO: 120 - DNA, 265 bp, synthetic construct
  source 1..265: mol_type = other DNA
ctatttttaaaaagctacacccagggagatagtcacacagagagagggcgtgtaaataaggcaccattctattggaggagcaactcagaaagctgcatgataactcagacctaggtgcaaccctcatctggcagtgcccctgtccctgccaacgaggaattctcttcttttttttctgcaggtgataaatctgtatcagatgactccggaaatgtgggaggagagaattactgcttgggactacaaagacgatgacgacaagtaa

SEQ ID NO: 121 - DNA, 273 bp, synthetic construct
  source 1..273: mol_type = other DNA
ctgtgtatggagacatgtgagaggataattatcccatgaaaacagtcctaaaaaggcaacagggcaagccaccatagtacaccttcatgctgtatttgtattgtttcagtgtaaaagcacagtggaacatgaaaaaacactggagttaagaacgaggaattctcttcttttttttctgcaggtgctatcaaagtggagcctgcatctccaccttattattctgagaagactcagctctacaataaggactacaaagacgatgacgacaagtaa

SEQ ID NO: 122 - DNA, 273 bp, synthetic construct
  source 1..273: mol_type = other DNA
aaaaggcaacagggcaagccaccatagtacaccttcatgctgtatttgtattgtttcagtgtaaaagcacagtggaacatgaaaaaacactggagttaaggcaagaaaaagaaaggtttgtaatcacaggcaagttataacatctctaagaacgaggaattctcttcttttttttctgcaggtgctatcaaagtggagcctgcatctccaccttattattctgagaagactcagctctacaataaggactacaaagacgatgacgacaagtaa

SEQ ID NO: 123 - DNA, 273 bp, synthetic construct
  source 1..273: mol_type = other DNA
ttgtttcagtgtaaaagcacagtggaacatgaaaaaacactggagttaaggcaagaaaaagaaaggtttgtaatcacaggcaagttataacatctctaagcctcacctgtaaatataaaatgggaatgagaattaagtctgtggttctataacgaggaattctcttcttttttttctgcaggtgctatcaaagtggagcctgcatctccaccttattattctgagaagactcagctctacaataaggactacaaagacgatgacgacaagtaa

SEQ ID NO: 124 - DNA, 268 bp, synthetic construct
  source 1..268: mol_type = other DNA
ctgtcaacatataggaaaaatgtcacttctgacaacataaccatgaagtgtgccaaatctgcaaggttcaaactttaaacccaagttcaaactgaatagaagggttaaatagaaccgaaatggtagagtaacagttcagatatgtgtatcaacgaggaattctcttcttttttttctgcagggaggtgacttcacacgccataatggcactggtggcaagtccatctatggggagaaatttgactacaaagacgatgacgacaagtaa

SEQ ID NO: 125 - DNA, 268 bp, synthetic construct
  source 1..268: mol_type = other DNA
tgccaaatctgcaaggttcaaactttaaacccaagttcaaactgaatagaagggttaaatagaaccgaaatggtagagtaacagttcagatatgtgtatcctgaaatattctggctcaatcccaaatgaagggagcaacccaaataaaataacgaggaattctcttcttttttttctgcagggaggtgacttcacacgccataatggcactggtggcaagtccatctatggggagaaatttgactacaaagacgatgacgacaagtaa

SEQ ID NO: 126 - DNA, 268 bp, synthetic construct
  source 1..268: mol_type = other DNA
actttaaacccaagttcaaactgaatagaagggttaaatagaaccgaaatggtagagtaacagttcagatatgtgtatcctgaaatattctggctcaatcccaaatgaagggagcaacccaaataaaataaaattcagtaaatttcgtacaacgaggaattctcttcttttttttctgcagggaggtgacttcacacgccataatggcactggtggcaagtccatctatggggagaaatttgactacaaagacgatgacgacaagtaa

SEQ ID NO: 127 - DNA, 265 bp, synthetic construct
  source 1..265: mol_type = other DNA
ctaggaagacagcaggggtcaggctagaaggacagactgcggtcctccagcaccctggggccactcccaactgatgctgccagccacgttgtcacccataggcccactgagacaagaggtggtggcatcatgcctgatttgcaatcagataacgaggaattctcttcttttttttctgcaggcgatctggctgctgtgcacaggcgctcgtgaggctgccttccggaacattaagaccgactacaaagacgatgacgacaagtaa

SEQ ID NO: 128 - DNA, 265 bp, synthetic construct
  source 1..265: mol_type = other DNA
caccctggggccactcccaactgatgctgccagccacgttgtcacccataggcccactgagacaagaggtggtggcatcatgcctgatttgcaatcagatagagggtcacaagagcaagtgtccagacacacacacacacaggctgaagtaacgaggaattctcttcttttttttctgcaggcgatctggctgctgtgcacaggcgctcgtgaggctgccttccggaacattaagaccgactacaaagacgatgacgacaagtaa

SEQ ID NO: 129 - DNA, 265 bp, synthetic construct
  source 1..265: mol_type = other DNA
ggcccactgagacaagaggtggtggcatcatgcctgatttgcaatcagatagagggtcacaagagcaagtgtccagacacacacacacacaggctgaagttgcgtccccagtgacaggagattgagacctgcctcaacagcaaactgctaaacgaggaattctcttcttttttttctgcaggcgatctggctgctgtgcacaggcgctcgtgaggctgccttccggaacattaagaccgactacaaagacgatgacgacaagtaa

SEQ ID NO: 130 - DNA, 268 bp, synthetic construct
  source 1..268: mol_type = other DNA
ctatgagggaggaaaatgtattatatatacttcttttcagtacatgaagtaaacttacttatcttttactatttctgtgatatatggaacaataaatacaataaaatccatttatatggctgggccaaatcagatacttttttgtactgtaacgaggaattctcttcttttttttctgcaggcaccacggcctccaaaacagccaaatgttcaggattttcaatttttcccaccacgcttagactacaaagacgatgacgacaagtaa

SEQ ID NO: 131 - DNA, 268 bp, synthetic construct
  source 1..268: mol_type = other DNA
aaacttacttatcttttactatttctgtgatatatggaacaataaatacaataaaatccatttatatggctgggccaaatcagatacttttttgtactgttatattttagagactatgatttggcaatgatacaagtaaatctgacccataacgaggaattctcttcttttttttctgcaggcaccacggcctccaaaacagccaaatgttcaggattttcaatttttcccaccacgcttagactacaaagacgatgacgacaagtaa

SEQ ID NO: 132 - DNA, 268 bp, synthetic construct
  source 1..268: mol_type = other DNA
ataaaatccatttatatggctgggccaaatcagatacttttttgtactgttatattttagagactatgatttggcaatgatacaagtaaatctgacccatagatcatgttgcaacagaaatctactttaggacataaaaactggccttgtaacgaggaattctcttcttttttttctgcaggcaccacggcctccaaaacagccaaatgttcaggattttcaatttttcccaccacgcttagactacaaagacgatgacgacaagtaa

SEQ ID NO: 133 - DNA, 268 bp, synthetic construct
  source 1..268: mol_type = other DNA
ctgtttaaaataagcaaacaaaaaaacagaagtaaagaaagatttccttgggaacagaaaatataaagtttctgaggagaattcaaatgaagccaaaacctcaaaaaagatacatgcaggacctgcaggcagtatccccaagagaaggctaacgaggaattctcttcttttttttctgcaggacctagaacagaaaatgaaagtggtagagaatctccaggatgactttgatttcaactatgactacaaagacgatgacgacaagtaa

SEQ ID NO: 134 - DNA, 268 bp, synthetic construct
  source 1..268: mol_type = other DNA
ggaacagaaaatataaagtttctgaggagaattcaaatgaagccaaaacctcaaaaaagatacatgcaggacctgcaggcagtatccccaagagaaggctccctgttggccaggtgcagtggctcacgcctgtaatgccagcactttgagaacgaggaattctcttcttttttttctgcaggacctagaacagaaaatgaaagtggtagagaatctccaggatgactttgatttcaactatgactacaaagacgatgacgacaagtaa

SEQ ID NO: 135 - DNA, 268 bp, synthetic construct
  source 1..268: mol_type = other DNA
tcaaaaaagatacatgcaggacctgcaggcagtatccccaagagaaggctccctgttggccaggtgcagtggctcacgcctgtaatgccagcactttgagaggctgagttgggaggatcacttgagcccaggagttcatgatcagcctggaacgaggaattctcttcttttttttctgcaggacctagaacagaaaatgaaagtggtagagaatctccaggatgactttgatttcaactatgactacaaagacgatgacgacaagtaa

SEQ ID NO: 136 - DNA, 268 bp, synthetic construct
  source 1..268: mol_type = other DNA
ctgtgtgagtggaggcgaggagactgacagtggccacgcagaaactcagacatcacctctgccctcagggcctggcctggcggtgtcccccactctctctctgacccccaccactccagaccccaagggcagggcgggctgtgtcccctcaacgaggaattctcttcttttttttctgcaggtcgatgtgacgggcgcgtacgacaccatcccccaggacaggctcacggaggtcatcgccgactacaaagacgatgacgacaagtaa

SEQ ID NO: 137 - DNA, 268 bp, synthetic construct
  source 1..268: mol_type = other DNA
catcacctctgccctcagggcctggcctggcggtgtcccccactctctctctgacccccaccactccagaccccaagggcagggcgggctgtgtcccctctctgagcctcaggacaggagacccctggctcaggactggggtgcaaggcaaacgaggaattctcttcttttttttctgcaggtcgatgtgacgggcgcgtacgacaccatcccccaggacaggctcacggaggtcatcgccgactacaaagacgatgacgacaagtaa

SEQ ID NO: 138 - DNA, 268 bp, synthetic construct
  source 1..268: mol_type = other DNA
ctgacccccaccactccagaccccaagggcagggcgggctgtgtcccctctctgagcctcaggacaggagacccctggctcaggactggggtgcaaggcaccggggcctggtggctgagccgttgcggttccttctctgacggaaactggaacgaggaattctcttcttttttttctgcaggtcgatgtgacgggcgcgtacgacaccatcccccaggacaggctcacggaggtcatcgccgactacaaagacgatgacgacaagtaa

SEQ ID NO: 139 - DNA, 268 bp, synthetic construct
  source 1..268: mol_type = other DNA
ctagaaggggcagggacaaaacaggtaaaataacaaatgcatggaattacaaacacaggactctaagtgggtctgctgtcagcacatcggcagcctgatggctgttaattcttgatgagcctggcttaggcaaagacaaatgataaatgaaacgaggaattctcttcttttttttctgcagtcctgtgcctcctgattgctgagtgttcacctggaccttctgactaccttccctgtgctagactacaaagacgatgacgacaagtaa

SEQ ID NO: 140 - DNA, 268 bp, synthetic construct
  source 1..268: mol_type = other DNA
aaacacaggactctaagtgggtctgctgtcagcacatcggcagcctgatggctgttaattcttgatgagcctggcttaggcaaagacaaatgataaatgaaaacaaacaacagcaatccaaaaaagaaaacacaaaagtctgattaacacaacgaggaattctcttcttttttttctgcagtcctgtgcctcctgattgctgagtgttcacctggaccttctgactaccttccctgtgctagactacaaagacgatgacgacaagtaa

SEQ ID NO: 141 - DNA, 268 bp, synthetic construct
  source 1..268: mol_type = other DNA
gctgttaattcttgatgagcctggcttaggcaaagacaaatgataaatgaaaacaaacaacagcaatccaaaaaagaaaacacaaaagtctgattaacactctcgatttgtgggaactgtctcgcgaagcagcacacagaaactaagcctaacgaggaattctcttcttttttttctgcagtcctgtgcctcctgattgctgagtgttcacctggaccttctgactaccttccctgtgctagactacaaagacgatgacgacaagtaa

SEQ ID NO: 142 - DNA, 344 bp, synthetic construct
  source 1..344: mol_type = other DNA
atgggagtcaaagttctgtttgccctgatctgcatcgctgtggccgaggccaagcccaccgagaacaacgaagacttcaacatcgtggccgtggccagcaacttcgcgaccacggatctcgatgctgaccgcgggaagttgcccggcaagaagctgccgctggaggtgctcaaagagatggaagccaatgcccggaaagctggctgcaccaggggctgtctgatctgcgtaagcacgtttggggttgaaaaaatctattgtaccccaggctccagttaaccccctgacccagcaagtcctgtgaccccccaagtcccatagataggccctatgacctagacctc

SEQ ID NO: 143 - DNA, 381 bp, synthetic construct
  source 1..381: mol_type = other DNA
atgggagtcaaagttctgtttgccctgatctgcatcgctgtggccgaggccaagcccaccgagaacaacgaagacttcaacatcgtggccgtggccagcaacttcgcgaccacggatctcgatgctgaccgcgggaagttgcccggcaagaagctgccgctggaggtgctcaaagagatggaagccaatgcccggaaagctggctgcaccaggggctgtctgatctgcgtaagcccgcggaacattattataacgttgctcgaatactaacacgtttggggttgaaaaaatctattgtaccccaggctccagttaaccccctgacccagcaagtcctgtgaccccccaagtcccatagataggccctatgacctagacctc

SEQ ID NO: 144 - DNA, 414 bp, synthetic construct
  source 1..414: mol_type = other DNA
aaccctgtagaaacctccccttgccccataccaggcttacaatcggcttcaacgtgctccacggctggcgatgggagtcaaagttctgtttgccctgatctgcatcgctgtggccgaggccaagcccaccgagaacaacgaagacttcaacatcgtggccgtggccagcaacttcgcgaccacggatctcgatgctgaccgcgggaagttgcccggcaagaagctgccgctggaggtgctcaaagagatggaagccaatgcccggaaagctggctgcaccaggggctgtctgatctgcgtaagcacgtttggggttgaaaaaatctattgtaccccaggctccagttaaccccctgacccagcaagtcctgtgaccccccaagtcccatagataggccctatgacctagacctc

SEQ ID NO: 145 - DNA, 451 bp, synthetic construct
  source 1..451: mol_type = other DNA
aaccctgtagaaacctccccttgccccataccaggcttacaatcggcttcaacgtgctccacggctggcgatgggagtcaaagttctgtttgccctgatctgcatcgctgtggccgaggccaagcccaccgagaacaacgaagacttcaacatcgtggccgtggccagcaacttcgcgaccacggatctcgatgctgaccgcgggaagttgcccggcaagaagctgccgctggaggtgctcaaagagatggaagccaatgcccggaaagctggctgcaccaggggctgtctgatctgcgtaagcccgcggaacattattataacgttgctcgaatactaacacgtttggggttgaaaaaatctattgtaccccaggctccagttaaccccctgacccagcaagtcctgtgaccccccaagtcccatagataggccctatgacctagacctc

SEQ ID NO: 146 - DNA, 454 bp, synthetic construct
  source 1..454: mol_type = other DNA
gaaataccagtgtgcagatcttggcccgcatttacaagactatcttgccagaaaaaaagcgtcgcagcaggtcatcaaaaaatcggcttcaacgtgctccacggctggcgatgggagtcaaagttctgtttgccctgatctgcatcgctgtggccgaggccaagcccaccgagaacaacgaagacttcaacatcgtggccgtggccagcaacttcgcgaccacggatctcgatgctgaccgcgggaagttgcccggcaagaagctgccgctggaggtgctcaaagagatggaagccaatgcccggaaagctggctgcaccaggggctgtctgatctgcgtaagcacgtttggggttgaaaaaatctattgtaccccaggctccagttaaccccctgacccagcaagtcctgtgaccccccaagtcccatagataggccctatgacctagacctc

SEQ ID NO: 147 - DNA, 491 bp, synthetic construct
  source 1..491: mol_type = other DNA
gaaataccagtgtgcagatcttggcccgcatttacaagactatcttgccagaaaaaaagcgtcgcagcaggtcatcaaaaaatcggcttcaacgtgctccacggctggcgatgggagtcaaagttctgtttgccctgatctgcatcgctgtggccgaggccaagcccaccgagaacaacgaagacttcaacatcgtggccgtggccagcaacttcgcgaccacggatctcgatgctgaccgcgggaagttgcccggcaagaagctgccgctggaggtgctcaaagagatggaagccaatgcccggaaagctggctgcaccaggggctgtctgatctgcgtaagcccgcggaacattattataacgttgctcgaatactaacacgtttggggttgaaaaaatctattgtaccccaggctccagttaaccccctgacccagcaagtcctgtgaccccccaagtcccatagataggccctatgacctagacctc

SEQ ID NO: 148 - DNA, 454 bp, synthetic construct
  source 1..454: mol_type = other DNA
cagggccgggaagcggccatctttccgctcacgcaactggtgccgaccgggccagccttgccgcccagggcggggcgataaatcggcttcaacgtgctccacggctggcgatgggagtcaaagttctgtttgccctgatctgcatcgctgtggccgaggccaagcccaccgagaacaacgaagacttcaacatcgtggccgtggccagcaacttcgcgaccacggatctcgatgctgaccgcgggaagttgcccggcaagaagctgccgctggaggtgctcaaagagatggaagccaatgcccggaaagctggctgcaccaggggctgtctgatctgcgtaagcacgtttggggttgaaaaaatctattgtaccccaggctccagttaaccccctgacccagcaagtcctgtgaccccccaagtcccatagataggccctatgacctagacctc

SEQ ID NO: 149 - DNA, 491 bp, synthetic construct
  source 1..491: mol_type = other DNA
cagggccgggaagcggccatctttccgctcacgcaactggtgccgaccgggccagccttgccgcccagggcggggcgataaatcggcttcaacgtgctccacggctggcgatgggagtcaaagttctgtttgccctgatctgcatcgctgtggccgaggccaagcccaccgagaacaacgaagacttcaacatcgtggccgtggccagcaacttcgcgaccacggatctcgatgctgaccgcgggaagttgcccggcaagaagctgccgctggaggtgctcaaagagatggaagccaatgcccggaaagctggctgcaccaggggctgtctgatctgcgtaagcccgcggaacattattataacgttgctcgaatactaacacgtttggggttgaaaaaatctattgtaccccaggctccagttaaccccctgacccagcaagtcctgtgaccccccaagtcccatagataggccctatgacctagacctc

SEQ ID NO: 150 - DNA, 454 bp, synthetic construct
  source 1..454: mol_type = other DNA
tcacgacacctgaaatggaagaaaaaaactttgaaccactgtctgaggcttgagaatgaaccaagatccaaactcaaaaaaatcggcttcaacgtgctccacggctggcgatgggagtcaaagttctgtttgccctgatctgcatcgctgtggccgaggccaagcccaccgagaacaacgaagacttcaacatcgtggccgtggccagcaacttcgcgaccacggatctcgatgctgaccgcgggaagttgcccggcaagaagctgccgctggaggtgctcaaagagatggaagccaatgcccggaaagctggctgcaccaggggctgtctgatctgcgtaagcacgtttggggttgaaaaaatctattgtaccccaggctccagttaaccccctgacccagcaagtcctgtgaccccccaagtcccatagataggccctatgacctagacctc

SEQ ID NO: 151 - DNA, 491 bp, synthetic construct
  source 1..491: mol_type = other DNA
tcacgacacctgaaatggaagaaaaaaactttgaaccactgtctgaggcttgagaatgaaccaagatccaaactcaaaaaaatcggcttcaacgtgctccacggctggcgatgggagtcaaagttctgtttgccctgatctgcatcgctgtggccgaggccaagcccaccgagaacaacgaagacttcaacatcgtggccgtggccagcaacttcgcgaccacggatctcgatgctgaccgcgggaagttgcccggcaagaagctgccgctggaggtgctcaaagagatggaagccaatgcccggaaagctggctgcaccaggggctgtctgatctgcgtaagcccgcggaacattattataacgttgctcgaatactaacacgtttggggttgaaaaaatctattgtaccccaggctccagttaaccccctgacccagcaagtcctgtgaccccccaagtcccatagataggccctatgacctagacctc

SEQ ID NO: 152 - DNA, 441 bp, synthetic construct
  source 1..441: mol_type = other DNA
tatccctatgatgtccccgattatgccggttcaagagccctggtcgtgattagactgagccgagtgacagacgccaccacaacgaggaattctcttcttttttttctgcagctgtcccacatcaagtgcacgcccaagatgaagaagttcatcccaggacgctgccacacctacgaaggcgacaaagagtccgcacagggcggcataggcgaggcgatcgtcgacattcctgagattcctgggttcaaggacttggagcccatggagcagttcatcgcacaggtcgatctgtgtgtggactgcacaactggctgcctcaaagggcttgccaacgtgcagtgttctgacctgctcaagaagtggctgccgcaacgctgtgcgacctttgccagcaagatccagggccaggtggacaagatcaagggggccggtggtgactaa

SEQ ID NO: 153 - DNA, 441 bp, synthetic construct
  source 1..441: mol_type = other DNA
gtgagtgacgggaggatggcgctctgagcacagcacagcccttgagcagtgaccctcctatagaacactatctgggctgtaacgaggaattctcttcttttttttctgcagctgtcccacatcaagtgcacgcccaagatgaagaagttcatcccaggacgctgccacacctacgaaggcgacaaagagtccgcacagggcggcataggcgaggcgatcgtcgacattcctgagattcctgggttcaaggacttggagcccatggagcagttcatcgcacaggtcgatctgtgtgtggactgcacaactggctgcctcaaagggcttgccaacgtgcagtgttctgacctgctcaagaagtggctgccgcaacgctgtgcgacctttgccagcaagatccagggccaggtggacaagatcaagggggccggtggtgactaa

SEQ ID NO: 154 - DNA, 441 bp, synthetic construct
  source 1..441: mol_type = other DNA
cttgagcagtgaccctcctatagaacactatctgggctgtgattccacagtgctgggcccgtgagcaggctgggagctctaacgaggaattctcttcttttttttctgcagctgtcccacatcaagtgcacgcccaagatgaagaagttcatcccaggacgctgccacacctacgaaggcgacaaagagtccgcacagggcggcataggcgaggcgatcgtcgacattcctgagattcctgggttcaaggacttggagcccatggagcagttcatcgcacaggtcgatctgtgtgtggactgcacaactggctgcctcaaagggcttgccaacgtgcagtgttctgacctgctcaagaagtggctgccgcaacgctgtgcgacctttgccagcaagatccagggccaggtggacaagatcaagggggccggtggtgactaa

SEQ ID NO: 155 - DNA, 441 bp, synthetic construct
  source 1..441: mol_type = other DNA
gattccacagtgctgggcccgtgagcaggctgggagctctgcggctctccttctgctagaacctgcccccagactcttggaacgaggaattctcttcttttttttctgcagctgtcccacatcaagtgcacgcccaagatgaagaagttcatcccaggacgctgccacacctacgaaggcgacaaagagtccgcacagggcggcataggcgaggcgatcgtcgacattcctgagattcctgggttcaaggacttggagcccatggagcagttcatcgcacaggtcgatctgtgtgtggactgcacaactggctgcctcaaagggcttgccaacgtgcagtgttctgacctgctcaagaagtggctgccgcaacgctgtgcgacctttgccagcaagatccagggccaggtggacaagatcaagggggccggtggtgactaa

SEQ ID NO: 156 - DNA, 441 bp, synthetic construct
  source 1..441: mol_type = other DNA
gcggctctccttctgctagaacctgcccccagactcttggctatgatcctgtgaccccaagaccgccatgcaggtcatgaaacgaggaattctcttcttttttttctgcagctgtcccacatcaagtgcacgcccaagatgaagaagttcatcccaggacgctgccacacctacgaaggcgacaaagagtccgcacagggcggcataggcgaggcgatcgtcgacattcctgagattcctgggttcaaggacttggagcccatggagcagttcatcgcacaggtcgatctgtgtgtggactgcacaactggctgcctcaaagggcttgccaacgtgcagtgttctgacctgctcaagaagtggctgccgcaacgctgtgcgacctttgccagcaagatccagggccaggtggacaagatcaagggggccggtggtgactaa

SEQ ID NO: 157 - DNA, 441 bp, synthetic construct
  source 1..441: mol_type = other DNA
ctatgatcctgtgaccccaagaccgccatgcaggtcatgagctctttgtgtcagtccattttgtataaccccttccctgcaacgaggaattctcttcttttttttctgcagctgtcccacatcaagtgcacgcccaagatgaagaagttcatcccaggacgctgccacacctacgaaggcgacaaagagtccgcacagggcggcataggcgaggcgatcgtcgacattcctgagattcctgggttcaaggacttggagcccatggagcagttcatcgcacaggtcgatctgtgtgtggactgcacaactggctgcctcaaagggcttgccaacgtgcagtgttctgacctgctcaagaagtggctgccgcaacgctgtgcgacctttgccagcaagatccagggccaggtggacaagatcaagggggccggtggtgactaa

SEQ ID NO: 158 - DNA, 441 bp, synthetic construct
  source 1..441: mol_type = other DNA
tgtcagcggtgactctgtgacttctgggcggggactgagctgtatgacttccaattccatgtgacctccattccaatgaaaacgaggaattctcttcttttttttctgcagctgtcccacatcaagtgcacgcccaagatgaagaagttcatcccaggacgctgccacacctacgaaggcgacaaagagtccgcacagggcggcataggcgaggcgatcgtcgacattcctgagattcctgggttcaaggacttggagcccatggagcagttcatcgcacaggtcgatctgtgtgtggactgcacaactggctgcctcaaagggcttgccaacgtgcagtgttctgacctgctcaagaagtggctgccgcaacgctgtgcgacctttgccagcaagatccagggccaggtggacaagatcaagggggccggtggtgactaa

SEQ ID NO: 159 - DNA, 441 bp, synthetic construct
  source 1..441: mol_type = other DNA
tgtatgacttccaattccatgtgacctccattccaatgaagactttgatcatacaaccccaaggcagggccaagctgtataacgaggaattctcttcttttttttctgcagctgtcccacatcaagtgcacgcccaagatgaagaagttcatcccaggacgctgccacacctacgaaggcgacaaagagtccgcacagggcggcataggcgaggcgatcgtcgacattcctgagattcctgggttcaaggacttggagcccatggagcagttcatcgcacaggtcgatctgtgtgtggactgcacaactggctgcctcaaagggcttgccaacgtgcagtgttctgacctgctcaagaagtggctgccgcaacgctgtgcgacctttgccagcaagatccagggccaggtggacaagatcaagggggccggtggtgactaa

SEQ ID NO: 160 - DNA, 441 bp, synthetic construct
  source 1..441: mol_type = other DNA
gactttgatcatacaaccccaaggcagggccaagctgtatctgtcctgtttgttttcagacaacggatctcgatgctgacaacgaggaattctcttcttttttttctgcagctgtcccacatcaagtgcacgcccaagatgaagaagttcatcccaggacgctgccacacctacgaaggcgacaaagagtccgcacagggcggcataggcgaggcgatcgtcgacattcctgagattcctgggttcaaggacttggagcccatggagcagttcatcgcacaggtcgatctgtgtgtggactgcacaactggctgcctcaaagggcttgccaacgtgcagtgttctgacctgctcaagaagtggctgccgcaacgctgtgcgacctttgccagcaagatccagggccaggtggacaagatcaagggggccggtggtgactaa

SEQ ID NO: 161 - DNA, 441 bp, synthetic construct
  source 1..441: mol_type = other DNA
cagggccaagctgtatctgtcctgtttgttttcagacaacggatctcgatgctgaccgcggcagtggagagggcagaggaaacgaggaattctcttcttttttttctgcagctgtcccacatcaagtgcacgcccaagatgaagaagttcatcccaggacgctgccacacctacgaaggcgacaaagagtccgcacagggcggcataggcgaggcgatcgtcgacattcctgagattcctgggttcaaggacttggagcccatggagcagttcatcgcacaggtcgatctgtgtgtggactgcacaactggctgcctcaaagggcttgccaacgtgcagtgttctgacctgctcaagaagtggctgccgcaacgctgtgcgacctttgccagcaagatccagggccaggtggacaagatcaagggggccggtggtgactaa

SEQ ID NO: 162 - DNA, 441 bp, synthetic construct
  source 1..441: mol_type = other DNA
ggatctcgatgctgaccgcggcagtggagagggcagaggaagtctgctaacatgcggtgacgtcgaggagaatcctggccaacgaggaattctcttcttttttttctgcagctgtcccacatcaagtgcacgcccaagatgaagaagttcatcccaggacgctgccacacctacgaaggcgacaaagagtccgcacagggcggcataggcgaggcgatcgtcgacattcctgagattcctgggttcaaggacttggagcccatggagcagttcatcgcacaggtcgatctgtgtgtggactgcacaactggctgcctcaaagggcttgccaacgtgcagtgttctgacctgctcaagaagtggctgccgcaacgctgtgcgacctttgccagcaagatccagggccaggtggacaagatcaagggggccggtggtgactaa

SEQ ID NO: 163 - DNA, 329 bp, synthetic construct
  source 1..329: mol_type = other DNA
ctgggtgggacgtgctccatttataccctgcgcaggctggaccgaggaccgcaagctgcgacggtgcacaagtaattgacaacgaggaattctcttcttttttttctgcagaccacggatctcgatgctgaccgcgggaagttgcccggcaagaagctgccgctggaggtgctcaaagagatggaagccaatgcccggaaagctggctgcaccaggggctgtctgatctgcgtaagcggcgcgtaggatccaggctccagttaaccccctgacccagcaagtcctgtgaccccccaagtcccatagataggccctatgacctagacctc

SEQ ID NO: 164 - DNA, 329 bp, synthetic construct
  source 1..329: mol_type = other DNA
ctgggtgggacgtgctccatttataccctgcgcaggctggaccgaggaccgcaagctgcgacggtgcacaagtaattgacaacgaggaattctcttcttttttttctgcagaccacggatctcgatgctgaccgcgggaagttgcccggcaagaagctgccgctggaggtgctcaaagagatggaagccaatgcccggaaagctggctgcaccaggggctgtctgatctgcgtaagcggcgcgtaggattggaggtgacaaagaccatcagtgctagtcccaggctccagttaaccccctgacccagcaagtcctgtgaccccccaagt

SEQ ID NO: 165 - DNA, 329 bp, synthetic construct
  source 1..329: mol_type = other DNA
tcatgacctgcatggcggtcttggggtcacaggatcatagccaagagtctgggggcaggttctagcagaaggagagccgcaacgaggaattctcttcttttttttctgcagaccacggatctcgatgctgaccgcgggaagttgcccggcaagaagctgccgctggaggtgctcaaagagatggaagccaatgcccggaaagctggctgcaccaggggctgtctgatctgcgtaagcggcgcgtaggatctgggtgggacgtgctccatttataccctgcgcaggctggaccgaggaccgcaagatgcgacggtgcacaagtaattgac

SEQ ID NO: 166 - DNA, 329 bp, synthetic construct
  source 1..329: mol_type = other DNA
gcggctctccttctgctagaacctgcccccagactcttggctatgatcctgtgaccccaagaccgccatgcaggtcatgaaacgaggaattctcttcttttttttctgcagaccacggatctcgatgctgaccgcgggaagttgcccggcaagaagctgccgctggaggtgctcaaagagatggaagccaatgcccggaaagctggctgcaccaggggctgtctgatctgcgtaagcggcgcgtaggatccccccaagtcccatagataggccctatgacctagacctcaaccctgtagaaacctccccttgccccataccaggcttac

SEQ ID NO: 167 - DNA, 329 bp, synthetic construct
  source 1..329: mol_type = other DNA
gcggctctccttctgctagaacctgcccccagactcttggctatgatcctgtgaccccaagaccgccatgcaggtcatgaaacgaggaattctcttcttttttttctgcagaccacggatctcgatgctgaccgcgggaagttgcccggcaagaagctgccgctggaggtgctcaaagagatggaagccaatgcccggaaagctggctgcaccaggggctgtctgatctgcgtaagcggcgcgtaggatccaggctccagttaaccccctgacccagcaagtcctgtgaccccccaagtcccatagataggccctatgacctagacctc

SEQ ID NO: 168 - DNA, 329 bp, synthetic construct
  source 1..329: mol_type = other DNA
gcggctctccttctgctagaacctgcccccagactcttggctatgatcctgtgaccccaagaccgccatgcaggtcatgaaacgaggaattctcttcttttttttctgcagaccacggatctcgatgctgaccgcgggaagttgcccggcaagaagctgccgctggaggtgctcaaagagatggaagccaatgcccggaaagctggctgcaccaggggctgtctgatctgcgtaagcggcgcgtaggattggaggtgacaaagaccatcagtgctagtcccaggctccagttaaccccctgacccagcaagtcctgtgaccccccaagt

SEQ ID NO: 169 - DNA, 329 bp, synthetic construct
  source 1..329: mol_type = other DNA
tgtcagcggtgactctgtgacttctgggcggggactgagctgtatgacttccaattccatgtgacctccattccaatgaaaacgaggaattctcttcttttttttctgcagaccacggatctcgatgctgaccgcgggaagttgcccggcaagaagctgccgctggaggtgctcaaagagatggaagccaatgcccggaaagctggctgcaccaggggctgtctgatctgcgtaagcggcgcgtaggatccccccaagtcccatagataggccctatgacctagacctcaaccctgtagaaacctccccttgccccataccaggcttac

SEQ ID NO: 170 - DNA, 329 bp, synthetic construct
  source 1..329: mol_type = other DNA
tgtcagcggtgactctgtgacttctgggcggggactgagctgtatgacttccaattccatgtgacctccattccaatgaaaacgaggaattctcttcttttttttctgcagaccacggatctcgatgctgaccgcgggaagttgcccggcaagaagctgccgctggaggtgctcaaagagatggaagccaatgcccggaaagctggctgcaccaggggctgtctgatctgcgtaagcggcgcgtaggatccaggctccagttaaccccctgacccagcaagtcctgtgaccccccaagtcccatagataggccctatgacctagacctc

SEQ ID NO: 171 - DNA, 329 bp, synthetic construct
  source 1..329: mol_type = other DNA
tgtcagcggtgactctgtgacttctgggcggggactgagctgtatgacttccaattccatgtgacctccattccaatgaaaacgaggaattctcttcttttttttctgcagaccacggatctcgatgctgaccgcgggaagttgcccggcaagaagctgccgctggaggtgctcaaagagatggaagccaatgcccggaaagctggctgcaccaggggctgtctgatctgcgtaagcggcgcgtaggattggaggtgacaaagaccatcagtgctagtcccaggctccagttaaccccctgacccagcaagtcctgtgaccccccaagt

SEQ ID NO: 172 - protein, 4 aa, synthetic construct
GGGS

SEQ ID NO: 173 - protein, 5 aa, synthetic construct
GGGGS

SEQ ID NO: 174 - protein, 24 aa, synthetic construct
  VARIANT 1..24: note = This sequence may encompass 1-12 GG repeating units
GGGGGGGGGGGGGGGGGGGGGGGG

SEQ ID NO: 175 - protein, 36 aa, synthetic construct
  VARIANT 1..36: note = This sequence may encompass 1-12 GGG repeating units
GGGGGGGGGGGGGGGGGGGGGGGGGGGGGGGGGGGG

SEQ ID NO: 176 - protein, 36 aa, synthetic construct
  VARIANT 1..36: note = This sequence may encompass 1-12 GGS repeating units
GGSGGSGGSGGSGGSGGSGGSGGSGGSGGSGGSGGS

SEQ ID NO: 177 - protein, 48 aa, synthetic construct
  VARIANT 1..48: note = This sequence may encompass 1-12 GGGS repeating units
GGGSGGGSGGGSGGGSGGGSGGGSGGGSGGGSGGGSGGGSGGGSGGGS

SEQ ID NO: 178 - protein, 60 aa, synthetic construct
  VARIANT 1..60: note = This sequence may encompass 1-12 GGGGS repeating units
GGGGSGGGGSGGGGSGGGGSGGGGSGGGGSGGGGSGGGGSGGGGSGGGGSGGGGSGGGGS

SEQ ID NO: 179 - protein, 401 aa, synthetic construct
MSLYDDLGVETSDSKTEGWSKNFKLLQSQLQVKKAALTQAKSQRTKQSTVLAPVIDLKRGGSSDDRQIVDTPPHVAAGLKDPVPSGFSAGEVLIPLADEYDPMFPNDYEKVVKRQREERQRQRELERQKEIEEREKRRKDRHEASGFARRPDPDSDEDEDYERERRKRSMGGAAIAPPTSLVEKDKELPRDFPYEEDSRPRSQSSKAAIPPPVYEEQDRPRSPTGPSNSFLANMGGTVAHKIMQKYGFREGQGLGKHEQGLSTALSVEKTSKRGGKIIVGDATEKDASKKSDSNPLTEILKCPTKVVLLRNMVGAGEVDEDLEVETKEECEKYGKVGKCVIFEIPGAPDDEAVRIFLEFERVESAIKAVVDLNGRYFGGRVVKACFYNLDKFRVLDLAEQV

SEQ ID NO: 180 - protein, 125 aa, synthetic construct
MAMQAAKRANIRLPPEVNRILYIRNLPYKITAEEMYDIFGKYGPIRQIRVGNTPETRGTAYVVYEDIFDAKNACDHLSGFNVCNRYLVVLYYNANRAFQKMDTKKKEEQLKLLKEKYGINTDPPK

SEQ ID NO: 181 - protein, 240 aa, synthetic construct
MAEYLASIFGTEKDKVNCSFYFKIGACRHGDRCSRLHNKPTFSQTIALLNIYRNPQNSSQSADGLRCAVSDVEMQEHYDEFFEEVFTEMEEKYGEVEEMNVCDNLGDHLVGNVYVKFRREEDAEKAVIDLNNRWFNGQPIHAELSPVTDFREACCRQYEMGECTRGGFCNFMHLKPISRELRRELYGRRRKKHRSRSRSRERRSRSRDRGRGGGGGGGGGGGGRERDRRRSRDRERSGRF

SEQ ID NO: 182 - protein, 475 aa, synthetic construct
MSDFDEFERQLNENKQERDKENRHRKRSHSRSRSRDRKRRSRSRDRRNRDQRSASRDRRRRSKPLTRGAKEEHGGLIRSPRHEKKKKVRKYWDVPPPGFEHITPMQYKAMQAAGQIPATALLPTMTPDGLAVTPTPVPVVGSQMTRQARRLYVGNIPFGITEEAMMDFFNAQMRLGGLTQAPGNPVLAVQINQDKNFAFLEFRSVDETTQAMAFDGIIFQGQSLKIRRPHDYQPLPGMSENPSVYVPGVVSTVVPDSAHKLFIGGLPNYLNDDQVKELLTSFGPLKAFNLVKDSATGLSKGYAFCEYVDINVTDQAIAGLNGMQLGDKKLLVQRASVGAKNATLVSPPSTINQTPVTLQVPGLMSSQVQMGGHPTEVLCLMNMVLPEELLDDEEYEEIVEDVRDECSKYGLVKSIEIPRPVDGVEVPGCGKIFVEFTSVFDCQKAMQGLTGRKFANRVVVTKYCDPDSYHRRDFW

SEQ ID NO: 183 - protein, 639 aa, synthetic construct
MATGANATPLDFPSKKRKRSRWNQDTMEQKTVIPGMPTVIPPGLTREQERAYIVQLQIEDLTRKLRTGDLGIPPNPEDRSPSPEPIYNSEGKRLNTREFRTRKKLEEERHNLITEMVALNPDFKPPADYKPPATRVSDKVMIPQDEYPEINFVGLLIGPRGNTLKNIEKECNAKIMIRGKGSVKEGKVGRKDGQMLPGEDEPLHALVTANTMENVKKAVEQIRNILKQGIETPEDQNDLRKMQLRELARLNGTLREDDNRILRPWQSSETRSITNTTVCTKCGGAGHIASDCKFQRPGDPQSAQDKARMDKEYLSLMAELGEAPVPASVGSTSGPATTPLASAPRPAAPANNPPPPSLMSTTQSRPPWMNSGPSESRPYHGMHGGGPGGPGGGPHSFPHPLPSLTGGHGGHPMQHNPNGPPPPWMQPPPPPMNQGPHPPGHHGPPPMDQYLGSTPVGSGVYRLHQGKGMMPPPPMGMMPPPPPPPSGQPPPPPSGPLPPWQQQQQQPPPPPPPSSSMASSTPLPWQQNTTTTTTSAGTGSIPPWQQQQAAAAASPGAPQMQGNPTMVPLPPGVQPPLPPGAPPPPPPPPPGSAGMMYAPPPPPPPPMDPSNFVTMMGMGVAGMPPFGMPPAPPPPPPQN

SEQ ID NO: 184 - protein, 1304 aa, synthetic construct
MAKIAKTHEDIEAQIREIQGKKAALDEAQGVGLDSTGYYDQEIYGGSDSRFAGYVTSIAATELEDDDDDYSSSTSLLGQKKPGYHAPVALLNDIPQSTEQYDPFAEHRPPKIADREDEYKKHRRTMIISPERLDPFADGGKTPDPKMNARTYMDVMREQHLTKEEREIRQQLAEKAKAGELKVVNGAAASQPPSKRKRRWDQTADQTPGATPKKLSSWDQAETPGHTPSLRWDETPGRAKGSETPGATPGSKIWDPTPSHTPAGAATPGRGDTPGHATPGHGGATSSARKNRWDETPKTERDTPGHGSGWAETPRTDRGGDSIGETPTPGASKRKSRWDETPASQMGGSTPVLTPGKTPIGTPAMNMATPTPGHIMSMTPEQLQAWRWEREIDERNRPLSDEELDAMFPEGYKVLPPPAGYVPIRTPARKLTATPTPLGGMTGFHMQTEDRTMKSVNDQPSGNLPFLKPDDIQYFDKLLVDVDESTLSPEEQKERKIMKLLLKIKNGTPPMRKAALRQITDKAREFGAGPLFNQILPLLMSPTLEDQERHLLVKVIDRILYKLDDLVRPYVHKILVVIEPLLIDEDYYARVEGREIISNLAKAAGLATMISTMRPDIDNMDEYVRNTTARAFAVVASALGIPSLLPFLKAVCKSKKSWQARHTGIKIVQQIAILMGCAILPHLRSLVEIIEHGLVDEQQKVRTISALAIAALAEAATPYGIESFDSVLKPLWKGIRQHRGKGLAAFLKAIGYLIPLMDAEYANYYTREVMLILIREFQSPDEEMKKIVLKVVKQCCGTDGVEANYIKTEILPPFFKHFWQHRMALDRRNYRQLVDTTVELANKVGAAEIISRIVDDLKDEAEQYRKMVMETIEKIMGNLGAADIDHKLEEQLIDGILYAFQEQTTEDSVMLNGFGTVVNALGKRVKPYLPQICGTVLWRLNNKSAKVRQQAADLISRTAVVMKTCQEEKLMGHLGVVLYEYLGEEYPEVLGSILGALKAIVNVIGMHKMTPPIKDLLPRLTPILKNRHEKVQENCIDLVGRIADRGAEYVSAREWMRICFELLELLKAHKKAIRRATVNTFGYIAKAIGPHDVLATLLNNLKVQERQNRVCTTVAIAIVAETCSPFTVLPALMNEYRVPELNVQNGVLKSLSFLFEYIGEMGKDYIYAVTPLLEDALMDRDLVHRQTASAVVQHMSLGVYGFGCEDSLNHLLNYVWPNVFETSPHVIQAVMGALEGLRVAIGPCRMLQYCLQGLFHPARKVRDVYWKIYNSIYIGSQDALIAHYPRIYNDDKNTYIRYELDYIL

SEQ ID NO: 185 - DNA, 1203 bp, synthetic construct
  source 1..1203: mol_type = other DNA
atgtccctgtacgatgacctaggagtggagaccagtgactcaaaaacagaaggctggtccaaaaacttcaaacttctgcagtctcagcttcaggtgaagaaggcagctctcactcaggcaaagagccaaaggacgaaacaaagtacagtcctcgccccagtcattgacctgaagcgaggtggctcctcagatgaccggcaaattgtggacactccaccgcatgtagcagctgggctgaaggatcctgttcccagtgggttttctgcaggggaagttctgattcccttagctgacgaatatgaccctatgtttcctaatgattatgagaaagtagtgaagcgccaaagagaggaacgacagagacagcgggagctggaaagacaaaaggaaatagaagaaagggaaaaaaggcgtaaagacagacatgaagcaagtgggtttgcaaggagaccagatccagattctgatgaagatgaagattatgagcgagagaggaggaaaagaagtatgggcggagctgccattgccccacccacttctctggtagagaaagacaaagagttaccccgagattttccttatgaagaggactcaagacctcgatcacagtcttccaaagcagccattcctcccccagtgtacgaggaacaagacagaccgagatctccaaccggacctagcaactccttcctcgctaacatggggggcacggtggcgcacaagatcatgcagaagtacggcttccgggagggccagggtctggggaagcatgagcagggcctgagcactgccttgtcagtggagaagaccagcaagcgtggcggcaagatcatcgtgggcgacgccacagagaaagatgcatccaagaagtcagattcaaatccgctgactgaaatacttaagtgtcctactaaagtggtcttactaaggaacatggttggtgcgggagaggtggatgaagacttggaagttgaaaccaaggaagaatgtgaaaaatatggcaaagttggaaaatgtgtgatatttgaaattcctggtgcccctgatgatgaagcagtacggatatttttagaatttgagagagttgaatcagcaattaaagcggttgttgacttgaatgggaggtattttggtggacgggtggtaaaagcatgtttctacaatttggacaaattcagggtcttggatttggcagaacaagtt

SEQ ID NO: 186 - DNA, 375 bp, synthetic construct
  source 1..375: mol_type = other DNA
atggcgatgcaagcggccaagagggcgaacattcgacttccacctgaagtaaatcggatattgtatataagaaatttgccatacaaaatcacagctgaagaaatgtatgatatatttgggaaatatggacctattcgtcaaatcagagtggggaacacacctgaaactagaggaacagcttatgtggtctatgaggacatctttgatgccaagaatgcatgtgatcacctatcgggattcaatgtttgtaacagataccttgtggttttgtactataatgccaacagggcatttcagaagatggacacaaagaagaaggaggaacagttgaagcttctcaaggagaaatatggcatcaacacagatccaccaaaa

SEQ ID NO: 187 - DNA, 720 bp, synthetic construct
  source 1..720: mol_type = other DNA
atggcggagtatctggcctccatcttcggcaccgagaaagacaaagtcaactgttcattttatttcaaaattggagcatgtcgtcatggagacaggtgctctcggttgcacaataaaccgacgtttagccagaccattgccctcttgaacatttaccgtaaccctcaaaactcttcccagtctgctgacggtttgcgctgtgccgtgagcgatgtggagatgcaggaacactatgatgagttttttgaggaggtttttacagaaatggaggagaagtatggggaagtagaggagatgaacgtctgtgacaacctgggagaccacctggtggggaacgtgtacgtcaagtttcgccgtgaggaagatgcggaaaaggctgtgattgacttgaataaccgttggtttaatggacagccgctccacgccgagctgtcacccgtgacggacttcagagaagcctgctgccgtcagtatgagatgggagaatgcacacgaggcggcttctgcaacttcatgcatttgaagcccatttccagagagctgcggcgggagctgtatggccgccgtcgcaagaagcatagatcaagatcccgatcccgggagcgtcgttctcggtctagagaccgtggtcgtggcggtggcggtggcggtggtggaggtggcggcggacgggagcgtgacaggaggcggtcgagagatcgtgaaagatctgggcgattc

SEQ ID NO: 188 - DNA, 1425 bp, synthetic construct
  source 1..1425: mol_type = other DNA
atgtcggacttcgacgagttcgagcggcagctcaacgagaataaacaagagcgggacaaggagaaccggcatcggaagcgcagccacagccgctctcggagccgggaccgcaaacgccggagccggagccgcgaccggcgcaaccgggaccagcggagcgcctcccgggacaggcgacgacgcagcaaacctttgaccagaggcgctaaagaggagcacggtggactgattcgttccccccgccacgagaagaagaagaaggtccgtaaatactgggacgtgccacccccaggctttgagcacatcaccccaatgcagtacaaggccatgcaagctgcgggtcagattccagccactgctcttctccccaccatgacccctgacggtctggctgtgaccccaacgccggtgcccgtggtcgggagccagatgaccagacaagcccggcgcctctacgtgggcaacatcccctttggcatcactgaggaggccatgatggatttcttcaacgcccagatgcgcctgggggggctgacccaggcccctggcaacccagtgttggctgtgcagattaaccaggacaagaattttgcctttttggagttccgctcagtggacgagactacccaggctatggcctttgatggcatcatcttccagggccagtcactaaagatccgcaggcctcacgactaccagccgcttcctggcatgtcagagaacccctccgtctatgtgcctggggttgtgtccactgtggtccccgactctgcccacaagctgttcatcgggggcttacccaactacctgaacgatgaccaggtcaaagagctgctgacatcctttgggcccctcaaggccttcaacctggtcaaggacagtgccacggggctctccaagggctacgccttctgtgagtacgtggacatcaacgtcacggatcaggccattgcggggctgaacggcatgcagctgggggataagaagctgctggtccagagggcgagtgtgggagccaagaatgccacgctggtgagccccccgagcaccatcaatcagacgcctgtgaccctgcaagtgccgggcttgatgagctcccaggtgcagatgggcggccacccgactgaggtcctgtgcctcatgaacatggtgctgcctgaggagctgctggacgacgaggagtatgaggagatcgtggaggacgtgcgggacgagtgcagcaagtacgggcttgtcaagtccatcgagatcccccggcctgtggacggcgtcgaggtgcccggctgcggaaagatctttgtggagttcacctctgtgtttgactgccagaaagccatgcagggcctgacgggccgcaagttcgccaacagagtggttgtcacaaaatactgtgaccccgactcttatcaccgccgggacttctgg

SEQ ID NO: 189 - DNA, 1917 bp, synthetic construct
  source 1..1917: mol_type = other DNA
atggccaccggcgccaacgccacccccctggacttccccagcaagaagagaaagagaagcagatggaaccaggacaccatggagcagaagaccgtgatccccggcatgcccaccgtgatcccccccggcctgaccagagagcaggagagagcctacatcgtgcagctgcagatcgaggacctgaccagaaagctgagaaccggcgacctgggcatcccccccaaccccgaggacagaagccccagccccgagcccatctacaacagcgagggcaagagactgaacaccagagagttcagaaccagaaagaagctggaggaggagagacacaacctgatcaccgagatggtggccctgaaccccgacttcaagccccccgccgactacaagccccccgccaccagagtgagcgacaaggtgatgatcccccaggacgagtaccccgagatcaacttcgtgggcctgctgatcggccccagaggcaacaccctgaagaacatcgagaaggagtgcaacgccaagatcatgatcagaggcaagggcagcgtgaaggagggcaaggtgggcagaaaggacggccagatgctgcccggcgaggacgagcccctgcacgccctggtgaccgccaacaccatggagaacgtgaagaaggccgtggagcagatcagaaacatcctgaagcagggcatcgagacccccgaggaccagaacgacctgagaaagatgcagctgagagagctggccagactgaacggcaccctgagagaggacgacaacagaatcctgagaccctggcagagcagcgagaccagaagcatcaccaacaccaccgtgtgcaccaagtgcggcggcgccggccacatcgccagcgactgcaagttccagagacccggcgacccccagagcgcccaggacaaggccagaatggacaaggagtacctgagcctgatggccgagctgggcgaggcccccgtgcccgccagcgtgggcagcaccagcggccccgccaccacccccctggccagcgcccccagacccgccgcccccgccaacaacccccccccccccagcctgatgagcaccacccagagcagacccccctggatgaacagcggccccagcgagagcagaccctaccacggcatgcacggcggcggccccggcggccccggcggcggcccccacagcttcccccaccccctgcccagcctgaccggcggccacggcggccaccccatgcagcacaaccccaacggccccccccccccctggatgcagcccccccccccccccatgaaccagggcccccacccccccggccaccacggccccccccccatggaccagtacctgggcagcacccccgtgggcagcggcgtgtacagactgcaccagggcaagggcatgatgccccccccccccatgggcatgatgcccccccccccccccccccccagcggccagcccccccccccccccagcggccccctgcccccctggcagcagcagcagcagcagcccccccccccccccccccccagcagcagcatggccagcagcacccccctgccctggcagcagaacaccaccaccaccaccaccagcgccggcaccggcagcatccccccctggcagcagcagcaggccgccgccgccgccagccccggcgccccccagatgcagggcaaccccaccatggtgcccctgccccccggcgtgcagccccccctgccccccggcgcccccccccccccccccccccccccccccggcagcgccggcatgatgtacgccccccccccccccccccccccccccatggaccccagcaacttcgtgaccatgatgggcatgggcgtggccggcatgccccccttcggcatgccccccgcccccccccccccccccccccagaac

SEQ ID NO: 190 - DNA, 3912 bp, synthetic construct
  source 1..3912: mol_type = other DNA
atggcgaagatcgccaagactcacgaagatattgaagcacagattcgagaaattcaaggcaagaaggcagctcttgatgaagctcaaggagtgggcctcgattctacaggttattatgaccaggaaatttatggtggaagtgacagcagatttgctggatacgtgacatcaattgctgcaactgaacttgaagatgatgacgatgactattcatcatctacgagtttgcttggtcagaagaagccaggatatcatgcccctgtggcattgcttaatgatataccacagtcaacagaacagtatgatccatttgctgagcacagacctccaaagattgcagaccgggaagatgaatacaaaaagcataggcggaccatgataatttccccagagcgtcttgatccttttgcagatggagggaaaacccctgatcctaaaatgaatgctaggacttacatggatgtaatgcgagaacaacacttgactaaagaagaacgagaaattaggcaacagctagcagaaaaagctaaagctggagaactaaaagtcgtcaatggagcagcagcgtcccagcctccatcaaaacgaaaacggcgttgggatcaaacagctgatcagactcctggtgccactcccaaaaaactatcaagttgggatcaggcagagacccctgggcatactccttccttaagatgggatgagacaccaggtcgtgcaaagggaagcgagactcctggagcaaccccaggctcaaaaatatgggatcctacacctagccacacaccagcgggagctgctactcctggacgaggtgatacaccaggccatgcgacaccaggccatggaggcgcaacttccagtgctcgtaaaaacagatgggatgaaacccccaaaacagagagagatactcctgggcatggaagtggatgggctgagactcctcgaacagatcgaggtggagattctattggtgaaacaccgactcctggagccagtaaaagaaaatcacggtgggatgaaacaccagctagtcagatgggtggaagcactccagttctgacccctggaaagacaccaattggcacaccagccatgaacatggctacccctactccaggtcacataatgagtatgactcctgaacagcttcaggcttggcggtgggaaagagaaattgatgagagaaatcgcccactttctgatgaggaattagatgctatgttcccagaaggatataaggtacttcctcctccagctggttatgttcctattcgaactccagctcgaaagctgacagctactccaacacctttgggtggtatgactggtttccacatgcaaactgaagatcgaactatgaaaagtgttaatgaccagccatctggaaatcttccatttttaaaacctgatgatattcaatactttgataaactattggttgatgttgatgaatcaacacttagtccagaagagcaaaaagagagaaaaataatgaagttgcttttaaaaattaagaatggaacaccaccaatgagaaaggctgcattgcgtcagattactgataaagctcgtgaatttggagctggtcctttgtttaatcagattcttcctctgctgatgtctcctacacttgaggatcaagagcgtcatttacttgtgaaagttattgataggatactgtacaaacttgatgacttagttcgtccatatgtgcataagatcctcgtggtcattgaaccgctattgattgatgaagattactatgctagagtggaaggccgagagatcatttctaatttggcaaaggctgctggtctggctactatgatctctaccatgagacctgatatagataacatggatgagtatgtccgtaacacaacagctagagcttttgctgttgtagcctctgccctgggcattccttctttattgcccttcttaaaagctgtgtgcaaaagcaagaagtcctggcaagcgagacacactggtattaagattgtacaacagatagctattcttatgggctgtgccatcttgccacatcttagaagtttagttgaaatcattgaacatggtcttgtggatgagcagcagaaagttcggaccatcagtgctttggccattgctgccttggctgaagcagcaactccttatggtatcgaatcttttgattctgtgttaaagcctttatggaagggtatccgccaacacagaggaaagggtttggctgctttcttgaaggctattgggtatcttattcctcttatggatgcagaatatgccaactactatactagagaagtgatgttaatccttattcgagaattccagtctcctgatgaggaaatgaaaaaaattgtgctgaaggtggtaaaacagtgttgtgggacagatggtgtagaagcaaactacattaaaacagagattcttcctcccttttttaaacacttctggcagcacaggatggctttggatagaagaaattaccgacagttagttgatactactgtggagttggcaaacaaagtaggtgcagcagaaattatatccaggattgtggatgatctgaaagatgaagccgaacagtacagaaaaatggtgatggagacaattgagaaaattatgggtaatttgggagcagcagatattgatcataaacttgaagaacaactgattgatggtattctttatgctttccaagaacagactacagaggactcagtaatgttgaacggctttggcacagtggttaatgctcttggcaaacgagtcaaaccatacttgcctcagatctgtggtacagttttgtggcgtttaaataacaaatctgctaaagttaggcaacaggcagctgacttgatttctcgaactgctgttgtcatgaagacttgtcaagaggaaaaattgatgggacacttgggtgttgtattgtatgagtatttgggtgaagagtaccctgaagtattgggcagcattcttggagcactgaaggccattgtaaatgtcataggtatgcataagatgactccaccaattaaagatctgctgcctagactcacccccatcttaaagaacagacatgaaaaagtacaagagaattgtattgatcttgttggtcgtattgctgacaggggagctgaatatgtatctgcaagagagtggatgaggatttgctttgagcttttagagctcttaaaagcccacaaaaaggctattcgtagagccacagtcaacacatttggttatattgcaaaggccattggccctcatgatgtattggctacacttctgaacaacctcaaagttcaagaaaggcagaacagagtttgtaccactgtagcaatagctattgttgcagaaacatgttcaccctttacagtactccctgccttaatgaatgaatacagagttcctgaactgaatgttcaaaatggagtgttaaaatcgctttccttcttgtttgaatatattggtgaaatgggaaaagactacatttatgccgtaacaccgttacttgaagatgctttaatggatagagaccttgtacacagacagacggctagtgcagtggtacagcacatgtcacttggggtttatggatttggttgtgaagattcgctgaatcacttgttgaactatgtatggcccaatgtatttgagacatctcctcatgtaattcaggcagttatgggagccctagagggcctgagagttgctattggaccatgtagaatgttgcaatattgtttacagggtctgtttcacccagcccggaaagtcagagatgtatattggaaaatttacaactccatctacattggttcccaggacgctctcatagcacattacccaagaatctacaacgatgataagaacacctatattcgttatgaacttgactatatctta

SEQ ID NO: 191 - protein, 1637 aa, synthetic construct
MKRTADGSEFESPKKKRKVTTTMKISIEFLEPFRMTKWQESTRRNKNNKEFVRGQAFARWHRNKKDNTKGRPYITGTLLRSAVIRSAENLLTLSDGKISEKTCCPGKFDTEDKDRLLQLRQRSTLRWTDKNPCPDNAETYCPFCELLGRSGNDGKKAEKKDWRFRIHFGNLSLPGKPDFDGPKAIGSQRVLNRVDFKSGKAHDFFKAYEVDHTRFPRFEGEITIDNKVSAEARKLLCDSLKFTDRLCGALCVIRFDEYTPAADSGKQTENVQAEPNANLAEKTAEQIISILDDNKKTEYTRLLADAIRSLRRSSKLVAGLPKDHDGKDDHYLWDIGKKKKDENSVTIRQILTTSADTKELKNAGKWREFCEKLGEALYLKSKDMSGGLKITRRILGDAEFHGKPDRLEKSRSVSIGSVLKETVVCGELVAKTPFFFGAIDEDAKQTDLQVLLTPDNKYRLPRSAVRGILRRDLQTYFDSPCNAELGGRPCMCKTCRIMRGITVMDARSEYNAPPEIRHRTRINPFTGTVAEGALFNMEVAPEGIVFPFQLRYRGSEDGLPDALKTVLKWWAEGQAFMSGAASTGKGRFRMENAKYETLDLSDENQRNDYLKNWGWRDEKGLEELKKRLNSGLPEPGNYRDPKWHEINVSIEMASPFINGDPIRAAVDKRGTDVVTFVKYKAEGEEAKPVCAYKAESFRGVIRSAVARIHMEDGVPLTELTHSDCECLLCQIFGSEYEAGKIRFEDLVFESDPEPVTFDHVAIDRFTGGAADKKKFDDSPLPGSPARPLMLKGSFWIRRDVLEDEEYCKALGKALADVNNGLYPLGGKSAIGYGQVKSLGIKGDDKRISRLMNPAFDETDVAVPEKPKTDAEVRIEAEKVYYPHYFVEPHKKVEREEKPCGHQKFHEGRLTGKIRCKLITKTPLIVPDTSNDDFFRPADKEARKEKDEYHKSYAFFRLHKQIMIPGSELRGMVSSVYETVTNSCFRIFDETKRLSWRMDADHQNVLQDFLPGRVTADGKHIQKFSETARVPFYDKTQKHFDILDEQEIAGEKPVRMWVKRFIKRLSLVDPAKHPQKKQDNKWKRRKEGIATFIEQKNGSYYFNVVTNNGCTSFHLWHKPDNFDQEKLEGIQNGEKLDCWVRDSRYQKAFQEIPENDPDGWECKEGYLHVVGPSKVEFSDKKGDVINNFQGTLPSVPNDWKTIRTNDFKNRKRKNEPVFCCEDDKGNYYTMAKYCETFFFDLKENEEYEIPEKARIKYKELLRVYNNNPQAVPESVFQSRVARENVEKLKSGDLVYFKHNEKYVEDIVPVRISRTVDDRMIGKRMSADLRPCHGDWVEDGDLSALNAYPEKRLLLRHPKGLCPACRLFGTGSYKGRVRFGFASLENDPEWLIPGKNPGDPFHGGPVMLSLLERPRPTWSIPGSDNKFKVPGRKFYVHHHAWKTIKDGNHPTTGKAIEQSPNNRTVEALAGGNSFSFEIAFENLKEWELGLLIHSLQLEKGLAHKLGMAKSMGFGSVEIDVESVRLRKDWKQWRNGNSEIPNWLGKGFAKLKEWFRDELDFIENLKKLLWFPEGDQAPRVCYPMLRKKDDPNGNSGYEELKRGEFKKEDRQKKLTTPWTPWAKRTADGSEFESPKKKRKV

SEQ ID NO: 192 - protein, 1637 aa, synthetic construct
MKRTADGSEFESPKKKRKVTTTMKISIEFLEPFRMTKWQESTRRNKNNKEFVRGQAFARWHRNKKDNTKGRPYITGTLLRSAVIRSAENLLTLSDGKISEKTCCPGKFDTEDKDRLLQLRQRSTLRWTDKNPCPDNAETYCPFCELLGRSGNDGKKAEKKDWRFRIHFGNLSLPGKPDFDGPKAIGSQRVLNRVDFKSGKAHDFFKAYEVDHTRFPRFEGEITIDNKVSAEARKLLCDSLKFTDRLCGALCVIRFDEYTPAADSGKQTENVQAEPNANLAEKTAEQIISILDDNKKTEYTRLLADAIRSLRRSSKLVAGLPKDHDGKDDHYLWDIGKKKKDENSVTIRQILTTSADTKELKNAGKWREFCEKLGEALYLKSKDMSGGLKITRRILGDAEFHGKPDRLEKSRSVSIGSVLKETVVCGELVAKTPFFFGAIDEDAKQTDLQVLLTPDNKYRLPRSAVRGILRRDLQTYFDSPCNAELGGRPCMCKTCRIMRGITVMDARSEYNAPPEIRHRTRINPFTGTVAEGALFNMEVAPEGIVFPFQLRYRGSEDGLPDALKTVLKWWAEGQAFMSGAASTGKGRFRMENAKYETLDLSDENQRNDYLKNWGWRDEKGLEELKKRLNSGLPEPGNYRDPKWHEINVSIEMASPFINGDPIRAAVDKRGTDVVTFVKYKAEGEEAKPVCAYKAESFRGVIRSAVARIHMEDGVPLTELTHSDCECLLCQIFGSEYEAGKIRFEDLVFESDPEPVTFDHVAIDRFTGGAADKKKFDDSPLPGSPARPLMLKGSFWIRRDVLEDEEYCKALGKALADVNNGLYPLGGKSAIGYGQVKSLGIKGDDKRISRLMNPAFDETDVAVPEKPKTDAEVRIEAEKVYYPHYFVEPHKKVEREEKPCGHQKFHEGRLTGKIRCKLITKTPLIVPDTSNDDFFRPADKEARKEKDEYHKSYAFFRLHKQIMIPGSELRGMVSSVYETVTNSCFRIFDETKRLSWRMDADHQNVLQKFLPGRVTADGKHIQKFSETARVPFYDKTQKHFDILDEQEIAGEKPVRMWVKRFIKRLSLVDPAKHPQKKQDNKWKRRKEGIATFIEQKNGSYYFNVVTNNGCTSFHLWHKPDNFDQEKLEGIQNGEKLDCWVRDSRYQKAFQEIPENDPDGWECKEGYLHVVGPSKVEFSDKKGDVINNFQGTLPSVPNDWKTIRTNDFKNRKRKNEPVFCCEDDKGNYYTMAKYCETFFFDLKENEEYEIPEKARIKYKELLRVYNNNPQAVPESVFQSRVARENVEKLKSGDLVYFKHNEKYVEDIVPVRISRTVDDRMIGKRMSADLRPCHGDWVEDGDLSALNAYPEKRLLLRHPKGLCPACRLFGTGSYKGRVRFGFASLENDPEWLIPGKNPGDPFHGGPVMLSLLERPRPTWSIPGSDNKFKVPGRKFYVHHHAWKTIKDGNHPTTGKAIEQSPNNRTVEALAGGNSFSFEIAFENLKEWELGLLIHSLQLEKGLAHKLGMAKSMGFGSVEIDVESVRLRKDWKQWRNGNSEIPNWLGKGFAKLKEWFRDELDFIENLKKLLWFPEGDQAPRVCYPMLRKKDDPNGNSGYEELKRGEFKKEDRQKKLTTPWTPWAKRTADGSEFESPKKKRKV

SEQ ID NO: 193 - protein, 1637 aa, synthetic construct
MKRTADGSEFESPKKKRKVTTTMKISIEFLEPFRMTKWQESTRRNKNNKEFVRGQAFARWHRNKKDNTKGRPYITGTLLRSAVIRSAENLLTLSDGKISEKTCCPGKFDTEDKDRLLQLRQRSTLRWTDKNPCPDNAETYCPFCELLGRSGNDGKKAEKKDWRFRIHFGNLSLPGKPDFDGPKAIGSQRVLNRVDFKSGKAHDFFKAYEVDHTRFPRFEGEITIDNKVSAEARKLLCDSLKFTDRLCGALCVIRFDEYTPAADSGKQTENVQAEPNANLAEKTAEQIISILDDNKKTEYTRLLADAIRSLRRSSKLVAGLPKDHDGKDDHYLWDIGKKKKDENSVTIRQILTTSADTKELKNAGKWREFCEKLGEALYLKSKDMSGGLKITRRILGDAEFHGKPDRLEKSRSVSIGSVLKETVVCGELVAKTPFFFGAIDEDAKQTDLQVLLTPDNKYRLPRSAVRGILRRDLQTYFDSPCNAELGGRPCMCKTCRIMRGITVMDARSEYNAPPEIRHRTRINPFTGTVAEGALFNMEVAPEGIVFPFQLRYRGSEDGLPDALKTVLKWWAEGQAFMSGAASTGKGRFRMENAKYETLDLSDENQRNDYLKNWGWRDEKGLEELKKRLNSGLPEPGNYRDPKWHEINVSIEMASPFINGDPIRAAVDKRGTDVVTFVKYKAEGEEAKPVCAYKAESFRGVIRSAVARIHMEDGVPLTELTHSDCECLLCQIFGSEYEAGKIRFEDLVFESDPEPVTFDHVAIDRFTGGAADKKKFDDSPLPGSPARPLMLKGSFWIRRDVLEDEEYCKALGKALADVNNGLYPLGGKSAIGYGQVKSLGIKGDDKRISRLMNPAFDETDVAVPEKPKTDAEVRIEAEKVYYPHYFVEPHKKVEREEKPCGHQKFHEGRLTGKIRCKLITKTPLIVPDTSNDDFFRPADKEARKEKDEYHKSYAFFRLHKQIMIPGSELRGMVSSVYETVTNSCFRIFDETKRLSWRMDAKHQNVLQKFLPGRVTADGKHIQKFSETARVPFYDKTQKHFDILDEQEIAGEKPVRMWVKRFIKRLSLVDPAKHPQKKQDNKWKRRKEGIATFIEQKNGSYYFNVVTNNGCTSFHLWHKPDNFDQEKLEGIQNGEKLDCWVRDSRYQKAFQEIPENDPDGWECKEGYLHVVGPSKVEFSDKKGDVINNFQGTLPSVPNDWKTIRTNDFKNRKRKNEPVFCCEDDKGNYYTMAKYCETFFFDLKENEEYEIPEKARIKYKELLRVYNNNPQAVPESVFQSRVARENVEKLKSGDLVYFKHNEKYVEDIVPVRISRTVDDRMIGKRMSADLRPCHGDWVEDGDLSALNAYPEKRLLLRHPKGLCPACRLFGTGSYKGRVRFGFASLENDPEWLIPGKNPGDPFHGGPVMLSLLERPRPTWSIPGSDNKFKVPGRKFYVHHHAWKTIKDGNHPTTGKAIEQSPNNRTVEALAGGNSFSFEIAFENLKEWELGLLIHSLQLEKGLAHKLGMAKSMGFGSVEIDVESVRLRKDWKQWRNGNSEIPNWLGKGFAKLKEWFRDELDFIENLKKLLWFPEGDQAPRVCYPMLRKKDDPNGNSGYEELKRGEFKKEDRQKKLTTPWTPWAKRTADGSEFESPKKKRKV

SEQ ID NO: 194 - protein, 1637 aa, synthetic construct
MKRTADGSEFESPKKKRKVTTTMKISIEFLEPFRMTKWQESTRRNKNNKEFVRGQAFARWHRNKKDNTKGRPYITGTLLRSAVIRSAENLLTLSDGKISEKTCCPGKFDTEDKDRLLQLRQRSTLRWTDKNPCPDNAETYCPFCELLGRSGNDGKKAEKKDWRFRIHFGNLSLPGKPDFDGPKAIGSQRVLNRVDFKSGKAHDFFKAYEVDHTRFPRFEGEITIDNKVSAEARKLLCDSLKFTDRLCGALCVIRFDEYTPAADSGKQTENVQAEPNANLAEKTAEQIISILDDNKKTEYTRLLADAIRSLRRSSKLVAGLPKDHDGKDDHKLWDIGKKKKDENSVTIRQILTTSADTKELKNAGKWREFCEKLGEALYLKSKDMSGGLKITRRILGDAEFHGKPDRLEKSRSVSIGSVLKETVVCGELVAKTPFFFGAIDEDAKQTDLQVLLTPDNKYRLPRSAVRGILRRDLQTYFDSPCNAELGGRPCMCKTCRIMRGITVMDARSEYNAPPEIRHRTRINPFTGTVAEGALFNMEVAPEGIVFPFQLRYRGSEDGLPDALKTVLKWWAEGQAFMSGAASTGKGRFRMENAKYETLDLSDENQRNDYLKNWGWRDEKGLEELKKRLNSGLPEPGNYRDPKWHEINVSIEMASPFINGDPIRAAVDKRGTDVVTFVKYKAEGEEAKPVCAYKAESFRGVIRSAVARIHMEDGVPLTELTHSDCECLLCQIFGSEYEAGKIRFEDLVFESDPEPVTFDHVAIDRFTGGAADKKKFDDSPLPGSPARPLMLKGSFWIRRDVLEDEEYCKALGKALADVNNGLYPLGGKSAIGYGQVKSLGIKGDDKRISRLMNPAFDETDVAVPEKPKTDAEVRIEAEKVYYPHYFVEPHKKVEREEKPCGHQKFHEGRLTGKIRCKLITKTPLIVPDTSNDDFFRPADKEARKEKDEYHKSYAFFRLHKQIMIPGSELRGMVSSVYETVTNSCFRIFDETKRLSWRMDAKHQNVLQKFLPGRVTADGKHIQKFSETARVPFYDKTQKHFDILDEQEIAGEKPVRMWVKRFIKRLSLVDPAKHPQKKQDNKWKRRKEGIATFIEQKNGSYYFNVVTNNGCTSFHLWHKPDNFDQEKLEGIQNGEKLDCWVRDSRYQKAFQEIPENDPDGWECKEGYLHVVGPSKVEFSDKKGDVINNFQGTLPSVPNDWKTIRTNDFKNRKRKNEPVFCCEDDKGNYYTMAKYCETFFFDLKENEEYEIPEKARIKYKELLRVYNNNPQAVPESVFQSRVARENVEKLKSGDLVYFKHNEKYVEDIVPVRISRTVDDRMIGKRMSADLRPCHGDWVEDGDLSALNAYPEKRLLLRHPKGLCPACRLFGTGSYKGRVRFGFASLENDPEWLIPGKNPGDPFHGGPVMLSLLERPRPTWSIPGSDNKFKVPGRKFYVHHHAWKTIKDGNHPTTGKAIEQSPNNRTVEALAGGNSFSFEIAFENLKEWELGLLIHSLQLEKGLAHKLGMAKSMGFGSVEIDVESVRLRKDWKQWRNGNSEIPNWLGKGFAKLKEWFRDELDFIENLKKLLWFPEGDQAPRVCYPMLRKKDDPNGNSGYEELKRGEFKKEDRQKKLTTPWTPWAKRTADGSEFESPKKKRKV

SEQ ID NO: 195 - protein, 1637 aa, synthetic construct
MKRTADGSEFESPKKKRKVTTTMKISIEFLEPFRMTKWQESTRRNKNNKEFVRGQAFARWHRNKKDNTKGRPYITGTLLRSAVIRSAENLLTLSDGKISEKTCCPGKFDTEDKDRLLQLRQRSTLRWTDKNPCPDNAETYCPFCELLGRSGNDGKKAEKKDWRFRIHFGNLSLPGKPDFDGPKAIGSQRVLNRVDFKSGKAHDFFKAYEVDHTRFPRFEGEITIDNKVSAEARKLLCDSLKFTDRLCGALCVIRFDEYTPAADSGKQTENVQAEPNANLAEKTAEQIISILDDNKKTEYTRLLADAIRSLRRSSKLVAGLPKDHDGKDDHKLWDIGKKKKDENSVTIRQILTTSADTKELKNAGKWREFCEKLGEALYLKSKDMSGGLKITRRILGDAEFHGKPDRLEKSRSVSIGSVLKETVVCGELVAKTPFFFGAIDEDAKQTDLQVLLTPDNKYRLPRSAVRGILRRDLQTYFDSPCNAELGGRPCMCKTCRIMRGITVMDARSEYNAPPEIRHRTRINPFTGTVAEGALFNMEVAPEGIVFPFQLRYRGSEDGLPDALKTVLKWWAEGQAFMSGAASTGKGRFRMENAKYETLDLSDENQRNDYLKNWGWRDEKGLEELKKRLNSGLPEPGNYRDPKWHEINVSIEMASPFINGDPIRAAVDKRGTDVVTFVKYKAEGEEAKPVCAYKAESFRGVIRSAVARIHMEDGVPLTELTHSDCECLLCQIFGSEYEAGKIRFEDLVFESDPEPVTFDHVAIDRFTGGAADKKKFDDSPLPGSPARPLMLKGSFWIRRDVLEDEEYCKALGKALADVNNGLYPLGGKSAIGYGQVKSLGIKGDDKRISRLMNPAFDETDVAVPEKPKTDAEVRIEAEKVYYPHYFVEPHKKVEREEKPCGHQKFHEGRLTGKIRCKLITKTPLIVPDTSNDDFFRPADKEARKEKDEYHKSYAFFRLHKQIMIPGSELRGMVSSVYETVTNSCFRIFDETKRLSWRMDADHQNVLQKFLPGRVTADGKHIQKFSETARVPFYDKTQKHFDILDEQEIAGEKPVRMWVKRFIKRLSLVDPAKHPQKKQDNKWKRRKEGIATFIEQKNGSYYFNVVTNNGCTSFHLWHKPDNFDQEKLEGIQNGEKLDCWVRDSRYQKAFQEIPENDPDGWECKEGYLHVVGPSKVEFSDKKGDVINNFQGTLPSVPNDWKTIRTNDFKNRKRKNEPVFCCEDDKGNYYTMAKYCETFFFDLKENEEYEIPEKARIKYKELLRVYNNNPQAVPESVFQSRVARENVEKLKSGDLVYFKHNEKYVEDIVPVRISRTVDDRMIGKRMSADLRPCHGDWVEDGDLSALNAYPEKRLLLRHPKGLCPACRLFGTGSYKGRVRFGFASLENDPEWLIPGKNPGDPFHGGPVMLSLLERPRPTWSIPGSDNKFKVPGRKFYVHHHAWKTIKDGNHPTTGKAIEQSPNNRTVEALAGGNSFSFEIAFENLKEWELGLLIHSLQLEKGLAHKLGMAKSMGFGSVEIDVESVRLRKDWKQWRNGNSEIPNWLGKGFAKLKEWFRDELDFIENLKKLLWFPEGDQAPRVCYPMLRKKDDPNGNSGYEELKRGEFKKEDRQKKLTTPWTPWAKRTADGSEFESPKKKRKV

SEQ ID NO: 196 - protein, 1354 aa, synthetic construct
MKRTADGSEFESPKKKRKVTTTMKISIEFLEPFRMTKWQESTRRNKNNKEFVRGQAFARWHRNKKDNTKGRPYITGTLLRSAVIRSAENLLTLSDGKISEKTCCPGKFDTEDKDRLLQLRQRSTLRWTDKNPCPDNAETYCPFCELLGRSGNDGKKAEKKDWRFRIHFGNLSLPGKPDFDGPKAIGSQRVLNRVDFKSGKAHDFFKAYEVDHTRFPRFEGEITIDNKVSAEARKLLCDSLKFTDRLCGALCVIRFDEYTPAADSGKQTENVQAEPNANLAEKTAEQIISILDDNKKTEYTRLLADAIRSLRRSSKLVAGLPKDHDGKDDHKLWDIGKKKKDENSVTIRQILTTSADTKELKNAGKWREFCEKLGEALYLKSKDMSGGLKITRRILGDAEFHGKPDRLEKSRSVSIGSVLKETVVCGELVAKTPFFFGAIDEDAKQTDLQVLLTPDNKYRLPRSAVRGILRRDLQTYFDSPCNAELGGRPCMCKTCRIMRGITVMDARSEYNAPPEIRHRTRINPFTGTVAEGALFNMEVAPEGIVFPFQLRYRGSEDGLPDALKTVLKWWAEGQAFMSGAASTGKGRFRMENAKYETLDLSDENQRNDYLKNWGWRDEKGLEELKKRLNSGLPEPGNYRDPKWHEINVSIEMASPFINGDPIRAAVDKRGTDVVTFVKYKAEGEEAKPVCAYKAESFRGVIRSAVARIHMEDGVPLTELTHSDCECLLCQIFGSEYEAGKIRFEDLVFESDPEPVTFDHVAIDRFTGGAADKKKFDDSPLPGSPARPLMLKGSFWIRRDVLEDEEYCKALGKALADVNNGLYPLGGKSAIGYGQVKSLGIKGDDKRISRLMNPAFDETDVAVPEKPKTDAEVRIEAEKVYYPHYFVEPHKKVEREEKPCGHQKFHEGRLTGKIRCKLITKTPLIVPDTSNDDFFRPADKEARKEKDEYHKSYAFFRLHKQIMIPGSELRGMVSSVYETVTNSCFRIFDETKRLSWRMDADHQNVLQKFLPGRVTADGKHIQKFSGGGSRTVDDRMIGKRMSADLRPCHGDWVEDGDLSALNAYPEKRLLLRHPKGLCPACRLFGTGSYKGRVRFGFASLENDPEWLIPGKNPGDPFHGGPVMLSLLERPRPTWSIPGSDNKFKVPGRKFYVHHHAWKTIKDGNHPTTGKAIEQSPNNRTVEALAGGNSFSFEIAFENLKEWELGLLIHSLQLEKGLAHKLGMAKSMGFGSVEIDVESVRLRKDWKQWRNGNSEIPNWLGKGFAKLKEWFRDELDFIENLKKLLWFPEGDQAPRVCYPMLRKKDDPNGNSGYEELKRGEFKKEDRQKKLTTPWTPWAKRTADGSEFESPKKKRKV

SEQ ID NO: 197 - DNA, 4914 bp, synthetic construct
  source 1..4914: mol_type = other DNA
atgaaacggacagccgacggaagcgagttcgagtcaccaaagaagaagcggaaagtcacgactactatgaagatttcaattgaattcctcgagccgtttcggatgaccaaatggcaggaaagcactaggcgaaacaagaacaacaaggaatttgttcgcggccaagcttttgcaagatggcatagaaataagaaggataacacaaaagggcggccttacataactgggacattgctgcggtccgcagtaattagaagcgcggaaaacctgctgacattgagtgatgggaaaattagcgaaaagacatgttgtcctgggaaatttgatacggaagataaagacaggttgctgcaattgaggcagcggtccacccttcgttggaccgataagaacccctgtccagataacgctgaaacttactgcccgttttgcgaacttctcgggagatccggtaacgatggaaagaaggctgagaagaaggattggcgctttcgtattcattttggcaatctttcccttccagggaagcccgatttcgacgggccaaaagctataggcagccaacgggtacttaacagggtcgatttcaaatccggtaaggcccatgacttctttaaggcttacgaagtcgaccatactaggtttccccgcttcgaaggggagattaccatagataataaagtcagcgctgaagccaggaaactgctctgtgattctctcaagtttacggatcggctgtgtggagctctgtgcgtaatcaggttcgatgaatatacaccagcagccgatagtgggaaacaaaccgaaaatgtccaagcagaaccgaatgctaatctcgctgaaaagaccgcagagcaaattattagcattctggacgataataagaaaaccgaatatacccgcctgcttgctgatgctattcgttcactccgccgctctagtaaacttgtcgctggcttgccaaaggatcatgacgggaaggatgaccattacctctgggatatcggcaagaagaagaaagacgaaaactctgtcactattaggcaaatccttacgacctcagcagacaccaaggaactcaagaatgccggaaaatggagagaattctgcgagaagctgggtgaagcgctgtacctcaagagtaaagacatgagtggcggcctgaaaattactcggagaatactgggcgatgctgaattccatggaaagcccgatcggcttgaaaagagccggtctgtgtcaatcggatctgtgttgaaagaaactgtggtatgcggcgaactggtcgctaaaacgcccttcttcttcggagcgatagacgaagatgcaaaacaaaccgacctgcaagtactcctcactcccgataacaagtatagactgccaagaagcgccgtgcgaggtatactccgtcgagatcttcaaacctattttgatagcccatgcaatgctgagttgggtggacggccatgcatgtgtaagacgtgtaggattatgagagggatcacggtgatggatgcgcgcagtgagtacaatgccccgccagaaataaggcatcgtacccgcattaatcccttcacaggcacggttgcggaaggtgccctgtttaatatggaagtagcccccgaggggattgtctttccatttcaactccggtaccggggctctgaagatgggctgcccgatgcactgaaaacggtgttgaaatggtgggctgaggggcaggcattcatgagtggcgctgcctcaaccgggaagggccgattccggatggaaaatgctaaatatgaaacgctggatctgagcgacgagaatcaaaggaatgactatcttaagaattggggatggcgtgacgagaaggggctcgaggaactgaagaaacgactgaactcaggtctgccagagcccggtaattatagggatccaaaatggcacgagattaacgtttccattgagatggcaagcccttttattaatggcgacccaatccgcgcagccgtggacaaacgtggtacagatgtggttaccttcgttaagtataaagctgaaggggaagaggcgaaacccgtatgtgcatacaaggccgaatcttttagaggggtgatcagaagtgccgtggcacgcattcatatggaagatggcgtccctttgactgagttgactcacagtgactgtgaatgtctcctgtgccaaatctttggaagtgagtatgaagccggcaaaataaggtttgaagatctcgtattcgaaagtgacccggaacctgtgaccttcgatcatgtggccatcgatagattcactggcggtgcagctgataagaagaaattcgatgattcccctctgcccggtagccctgcaagaccgctcatgttgaaaggctccttctggatccgcagggacgttctcgaggacgaagagtactgtaaggcactcggtaaggctcttgcagatgtgaataatggcctttatcccctcggtggaaagagcgccatcggctacggacaggtcaagagtctgggtataaagggagatgataagaggatttctcgcctcatgaatcctgcctttgatgagacagatgtagccgttccagaaaagcccaaaactgatgccgaggttcgcatcgaggcagagaaagtatattacccacactatttcgtcgaaccccataagaaggtggaacgcgaggagaaaccctgtggtcatcaaaagttccacgaggggcgactgacaggtaaaattcggtgtaagctcattaccaagacacccctcatcgtcccagatactagtaatgacgatttcttcagacctgcggataaagaagctcggaaggaaaaggacgaatatcataaatcatatgctttcttcagacttcataaacaaatcatgattcccgggagcgaattgagaggaatggtgagtagtgtctacgaaactgtgacaaattcttgcttcaggatatttgatgagactaaacggttgtcatggcggatggatgctgatcaccagaatgtgctgcaagactttctcccaggtcgagtgaccgccgatgggaaacatatacaaaagttttccgaaactgcaagggtgcctttctatgacaaaacgcagaaacattttgacattcttgatgagcaagaaattgctggtgagaaacctgttcggatgtgggtcaagcgttttattaaacgactgagcctcgttgatcctgctaaacacccccagaagaaacaagacaataaatggaaaagacgcaaagaaggcatcgccacatttatagagcaaaagaatggctcttattattttaacgtggtcaccaataatggctgcacttctttccacttgtggcataaacctgacaattttgaccaggagaaactcgaaggcatacagaatggtgagaaactggattgctgggtaagagatagtagataccaaaaggcctttcaagagatacccgagaacgacccagacggatgggagtgtaaagagggctaccttcatgtcgtcggccccagcaaagtagagtttagtgacaagaaaggggatgtgatcaataactttcaaggaacactcccatcagttcccaacgactggaaaacaattaggacgaacgattttaagaataggaaaaggaagaatgaacctgtgttttgttgtgaggatgataagggcaattactataccatggctaaatattgcgaaaccttcttcttcgatctgaaggagaacgaggaatacgagatccccgagaaagcaagaatcaaatacaaagaactgctcagggtctataacaacaatcctcaagcagtgccggagagcgtatttcagtctagagttgcccgggaaaacgtggaaaagctgaagtccggagatcttgtgtatttcaaacataatgaaaagtacgtagaggacatcgtcccagtgcggatttcccgaactgtagacgataggatgatcggcaaacgtatgagcgccgatctgcggccgtgccatggagattgggtggaagatggtgatctcagtgccttgaatgcatatcccgagaaaagactcctcttgcgccaccccaaaggactctgccctgcttgccggctctttggaaccggatcttacaagggcagagtcaggtttggattcgcgtcactcgaaaacgatccggagtggctgatcccaggcaagaatcccggcgatccgtttcacggcgggccggtgatgctctcattgttggaacggcctcgcccgacttggagtataccgggatccgacaataagtttaaagtgcctggcagaaagttttacgtccaccaccacgcctggaaaaccattaaggacgggaaccatcccacaacaggcaaagctattgaacaaagccctaataaccgcactgtagaagctctcgccggcgggaattcctttagcttcgaaattgcctttgagaacctgaaagaatgggagctgggtttgctcatccacagcctgcaactcgaaaagggtctggcgcataaacttggaatggcaaagtctatgggatttggttcagttgaaattgacgtcgaatcagtgcgcctgagaaaagattggaagcaatggcggaatggcaattccgaaattcccaactggttgggaaaaggatttgctaaactgaaggaatggttccgggacgagctcgattttatagaaaatcttaagaaacttctttggtttcctgagggcgaccaagcaccccgggtttgctaccccatgctgcgaaagaaggacgatcctaatgggaatagcggttacgaagaactcaaaagaggggaattcaagaaagaagatcggcagaagaagctgaccacgccgtggacaccgtgggcaaaacggacagccgacggaagcgagttcgagtcaccaaagaagaagcggaaagtctaa

SEQ ID NO: 198 - DNA, 4914 bp, synthetic construct
  source 1..4914: mol_type = other DNA
atgaaacggacagccgacggaagcgagttcgagtcaccaaagaagaagcggaaagtcacgactactatgaagatttcaattgaattcctcgagccgtttcggatgaccaaatggcaggaaagcactaggcgaaacaagaacaacaaggaatttgttcgcggccaagcttttgcaagatggcatagaaataagaaggataacacaaaagggcggccttacataactgggacattgctgcggtccgcagtaattagaagcgcggaaaacctgctgacattgagtgatgggaaaattagcgaaaagacatgttgtcctgggaaatttgatacggaagataaagacaggttgctgcaattgaggcagcggtccacccttcgttggaccgataagaacccctgtccagataacgctgaaacttactgcccgttttgcgaacttctcgggagatccggtaacgatggaaagaaggctgagaagaaggattggcgctttcgtattcattttggcaatctttcccttccagggaagcccgatttcgacgggccaaaagctataggcagccaacgggtacttaacagggtcgatttcaaatccggtaaggcccatgacttctttaaggcttacgaagtcgaccatactaggtttccccgcttcgaaggggagattaccatagataataaagtcagcgctgaagccaggaaactgctctgtgattctctcaagtttacggatcggctgtgtggagctctgtgcgtaatcaggttcgatgaatatacaccagcagccgatagtgggaaacaaaccgaaaatgtccaagcagaaccgaatgctaatctcgctgaaaagaccgcagagcaaattattagcattctggacgataataagaaaaccgaatatacccgcctgcttgctgatgctattcgttcactccgccgctctagtaaacttgtcgctggcttgccaaaggatcatgacgggaaggatgaccattacctctgggatatcggcaagaagaagaaagacgaaaactctgtcactattaggcaaatccttacgacctcagcagacaccaaggaactcaagaatgccggaaaatggagagaattctgcgagaagctgggtgaagcgctgtacctcaagagtaaagacatgagtggcggcctgaaaattactcggagaatactgggcgatgctgaattccatggaaagcccgatcggcttgaaaagagccggtctgtgtcaatcggatctgtgttgaaagaaactgtggtatgcggcgaactggtcgctaaaacgcccttcttcttcggagcgatagacgaagatgcaaaacaaaccgacctgcaagtactcctcactcccgataacaagtatagactgccaagaagcgccgtgcgaggtatactccgtcgagatcttcaaacctattttgatagcccatgcaatgctgagttgggtggacggccatgcatgtgtaagacgtgtaggattatgagagggatcacggtgatggatgcgcgcagtgagtacaatgccccgccagaaataaggcatcgtacccgcattaatcccttcacaggcacggttgcggaaggtgccctgtttaatatggaagtagcccccgaggggattgtctttccatttcaactccggtaccggggctctgaagatgggctgcccgatgcactgaaaacggtgttgaaatggtgggctgaggggcaggcattcatgagtggcgctgcctcaaccgggaagggccgattccggatggaaaatgctaaatatgaaacgctggatctgagcgacgagaatcaaaggaatgactatcttaagaattggggatggcgtgacgagaaggggctcgaggaactgaagaaacgactgaactcaggtctgccagagcccggtaattatagggatccaaaatggcacgagattaacgtttccattgagatggcaagcccttttattaatggcgacccaatccgcgcagccgtggacaaacgtggtacagatgtggttaccttcgttaagtataaagctgaaggggaagaggcgaaacccgtatgtgcatacaaggccgaatcttttagaggggtgatcagaagtgccgtggcacgcattcatatggaagatggcgtccctttgactgagttgactcacagtgactgtgaatgtctcctgtgccaaatctttggaagtgagtatgaagccggcaaaataaggtttgaagatctcgtattcgaaagtgacccggaacctgtgaccttcgatcatgtggccatcgatagattcactggcggtgcagctgataagaagaaattcgatgattcccctctgcccggtagccctgcaagaccgctcatgttgaaaggctccttctggatccgcagggacgttctcgaggacgaagagtactgtaaggcactcggtaaggctcttgcagatgtgaataatggcctttatcccctcggtggaaagagcgccatcggctacggacaggtcaagagtctgggtataaagggagatgataagaggatttctcgcctcatgaatcctgcctttgatgagacagatgtagccgttccagaaaagcccaaaactgatgccgaggttcgcatcgaggcagagaaagtatattacccacactatttcgtcgaaccccataagaaggtggaacgcgaggagaaaccctgtggtcatcaaaagttccacgaggggcgactgacaggtaaaattcggtgtaagctcattaccaagacacccctcatcgtcccagatactagtaatgacgatttcttcagacctgcggataaagaagctcggaaggaaaaggacgaatatcataaatcatatgctttcttcagacttcataaacaaatcatgattcccgggagcgaattgagaggaatggtgagtagtgtctacgaaactgtgacaaattcttgcttcaggatatttgatgagactaaacggttgtcatggcggatggatgctgatcaccagaatgtgctgcaaaagtttctcccaggtcgagtgaccgccgatgggaaacatatacaaaagttttccgaaactgcaagggtgcctttctatgacaaaacgcagaaacattttgacattcttgatgagcaagaaattgctggtgagaaacctgttcggatgtgggtcaagcgttttattaaacgactgagcctcgttgatcctgctaaacacccccagaagaaacaagacaataaatggaaaagacgcaaagaaggcatcgccacatttatagagcaaaagaatggctcttattattttaacgtggtcaccaataatggctgcacttctttccacttgtggcataaacctgacaattttgaccaggagaaactcgaaggcatacagaatggtgagaaactggattgctgggtaagagatagtagataccaaaaggcctttcaagagatacccgagaacgacccagacggatgggagtgtaaagagggctaccttcatgtcgtcggccccagcaaagtagagtttagtgacaagaaaggggatgtgatcaataactttcaaggaacactcccatcagttcccaacgactggaaaacaattaggacgaacgattttaagaataggaaaaggaagaatgaacctgtgttttgttgtgaggatgataagggcaattactataccatggctaaatattgcgaaaccttcttcttcgatctgaaggagaacgaggaatacgagatccccgagaaagcaagaatcaaatacaaagaactgctcagggtctataacaacaatcctcaagcagtgccggagagcgtatttcagtctagagttgcccgggaaaacgtggaaaagctgaagtccggagatcttgtgtatttcaaacataatgaaaagtacgtagaggacatcgtcccagtgcggatttcccgaactgtagacgataggatgatcggcaaacgtatgagcgccgatctgcggccgtgccatggagattgggtggaagatggtgatctcagtgccttgaatgcatatcccgagaaaagactcctcttgcgccaccccaaaggactctgccctgcttgccggctctttggaaccggatcttacaagggcagagtcaggtttggattcgcgtcactcgaaaacgatccggagtggctgatcccaggcaagaatcccggcgatccgtttcacggcgggccggtgatgctctcattgttggaacggcctcgcccgacttggagtataccgggatccgacaataagtttaaagtgcctggcagaaagttttacgtccaccaccacgcctggaaaaccattaaggacgggaaccatcccacaacaggcaaagctattgaacaaagccctaataaccgcactgtagaagctctcgccggcgggaattcctttagcttcgaaattgcctttgagaacctgaaagaatgggagctgggtttgctcatccacagcctgcaactcgaaaagggtctggcgcataaacttggaatggcaaagtctatgggatttggttcagttgaaattgacgtcgaatcagtgcgcctgagaaaagattggaagcaatggcggaatggcaattccgaaattcccaactggttgggaaaaggatttgctaaactgaaggaatggttccgggacgagctcgattttatagaaaatcttaagaaacttctttggtttcctgagggcgaccaagcaccccgggtttgctaccccatgctgcgaaagaaggacgatcctaatgggaatagcggttacgaagaactcaaaagaggggaattcaagaaagaagatcggcagaagaagctgaccacgccgtggacaccgtgggcaaaacggacagccgacggaagcgagttcgagtcaccaaagaagaagcggaaagtctaa

SEQ ID NO: 199 - DNA, 4914 bp, synthetic construct
  source 1..4914: mol_type = other DNA
atgaaacggacagccgacggaagcgagttcgagtcaccaaagaagaagcggaaagtcacgactactatgaagatttcaattgaattcctcgagccgtttcggatgaccaaatggcaggaaagcactaggcgaaacaagaacaacaaggaatttgttcgcggccaagcttttgcaagatggcatagaaataagaaggataacacaaaagggcggccttacataactgggacattgctgcggtccgcagtaattagaagcgcggaaaacctgctgacattgagtgatgggaaaattagcgaaaagacatgttgtcctgggaaatttgatacggaagataaagacaggttgctgcaattgaggcagcggtccacccttcgttggaccgataagaacccctgtccagataacgctgaaacttactgcccgttttgcgaacttctcgggagatccggtaacgatggaaagaaggctgagaagaaggattggcgctttcgtattcattttggcaatctttcccttccagggaagcccgatttcgacgggccaaaagctataggcagccaacgggtacttaacagggtcgatttcaaatccggtaaggcccatgacttctttaaggcttacgaagtcgaccatactaggtttccccgcttcgaaggggagattaccatagataataaagtcagcgctgaagccaggaaactgctctgtgattctctcaagtttacggatcggctgtgtggagctctgtgcgtaatcaggttcgatgaatatacaccagcagccgatagtgggaaacaaaccgaaaatgtccaagcagaaccgaatgctaatctcgctgaaaagaccgcagagcaaattattagcattctggacgataataagaaaaccgaatatacccgcctgcttgctgatgctattcgttcactccgccgctctagtaaacttgtcgctggcttgccaaaggatcatgacgggaaggatgaccattacctctgggatatcggcaagaagaagaaagacgaaaactctgtcactattaggcaaatccttacgacctcagcagacaccaaggaactcaagaatgccggaaaatggagagaattctgcgagaagctgggtgaagcgctgtacctcaagagtaaagacatgagtggcggcctgaaaattactcggagaatactgggcgatgctgaattccatggaaagcccgatcggcttgaaaagagccggtctgtgtcaatcggatctgtgttgaaagaaactgtggtatgcggcgaactggtcgctaaaacgcccttcttcttcggagcgatagacgaagatgcaaaacaaaccgacctgcaagtactcctcactcccgataacaagtatagactgccaagaagcgccgtgcgaggtatactccgtcgagatcttcaaacctattttgatagcccatgcaatgctgagttgggtggacggccatgcatgtgtaagacgtgtaggattatgagagggatcacggtgatggatgcgcgcagtgagtacaatgccccgccagaaataaggcatcgtacccgcattaatcccttcacaggcacggttgcggaaggtgccctgtttaatatggaagtagcccccgaggggattgtctttccatttcaactccggtaccggggctctgaagatgggctgcccgatgcactgaaaacggtgttgaaatggtgggctgaggggcaggcattcatgagtggcgctgcctcaaccgggaagggccgattccggatggaaaatgctaaatatgaaacgctggatctgagcgacgagaatcaaaggaatgactatcttaagaattggggatggcgtgacgagaaggggctcgaggaactgaagaaacgactgaactcaggtctgccagagcccggtaattatagggatccaaaatggcacgagattaacgtttccattgagatggcaagcccttttattaatggcgacccaatccgcgcagccgtggacaaacgtggtacagatgtggttaccttcgttaagtataaagctgaaggggaagaggcgaaacccgtatgtgcatacaaggccgaatcttttagaggggtgatcagaagtgccgtggcacgcattcatatggaagatggcgtccctttgactgagttgactcacagtgactgtgaatgtctcctgtgccaaatctttggaagtgagtatgaagccggcaaaataaggtttgaagatctcgtattcgaaagtgacccggaacctgtgaccttcgatcatgtggccatcgatagattcactggcggtgcagctgataagaagaaattcgatgattcccctctgcccggtagccctgcaagaccgctcatgttgaaaggctccttctggatccgcagggacgttctcgaggacgaagagtactgtaaggcactcggtaaggctcttgcagatgtgaataatggcctttatcccctcggtggaaagagcgccatcggctacggacaggtcaagagtctgggtataaagggagatgataagaggatttctcgcctcatgaatcctgcctttgatgagacagatgtagccgttccagaaaagcccaaaactgatgccgaggttcgcatcgaggcagagaaagtatattacccacactatttcgtcgaaccccataagaaggtggaacgcgaggagaaaccctgtggtcatcaaaagttccacgaggggcgactgacaggtaaaattcggtgtaagctcattaccaagacacccctcatcgtcccagatactagtaatgacgatttcttcagacctgcggataaagaagctcggaaggaaaaggacgaatatcataaatcatatgctttcttcagacttcataaacaaatcatgattcccgggagcgaattgagaggaatggtgagtagtgtctacgaaactgtgacaaattcttgcttcaggatatttgatgagactaaacggttgtcatggcggatggatgctaagcaccagaatgtgctgcaaaagtttctcccaggtcgagtgaccgccgatgggaaacatatacaaaagttttccgaaactgcaagggtgcctttctatgacaaaacgcagaaacattttgacattcttgatgagcaagaaattgctggtgagaaacctgttcggatgtgggtcaagcgttttattaaacgactgagcctcgttgatcctgctaaacacccccagaagaaacaagacaataaatggaaaagacgcaaagaaggcatcgccacatttatagagcaaaagaatggctcttattattttaacgtggtcaccaataatggctgcacttctttccacttgtggcataaacctgacaattttgaccaggagaaactcgaaggcatacagaatggtgagaaactggattgctgggtaagagatagtagataccaaaaggcctttcaagagatacccgagaacgacccagacggatgggagtgtaaagagggctaccttcatgtcgtcggccccagcaaagtagagtttagtgacaagaaaggggatgtgatcaataactttcaaggaacactcccatcagttcccaacgactggaaaacaattaggacgaacgattttaagaataggaaaaggaagaatgaacctgtgttttgttgtgaggatgataagggcaattactataccatggctaaatattgcgaaaccttcttcttcgatctgaaggagaacgaggaatacgagatccccgagaaagcaagaatcaaatacaaagaactgctcagggtctataacaacaatcctcaagcagtgccggagagcgtatttcagtctagagttgcccgggaaaacgtggaaaagctgaagtccggagatcttgtgtatttcaaacataatgaaaagtacgtagaggacatcgtcccagtgcggatttcccgaactgtagacgataggatgatcggcaaacgtatgagcgccgatctgcggccgtgccatggagattgggtggaagatggtgatctcagtgccttgaatgcatatcccgagaaaagactcctcttgcgccaccccaaaggactctgccctgcttgccggctctttggaaccggatcttacaagggcagagtcaggtttggattcgcgtcactcgaaaacgatccggagtggctgatcccaggcaagaatcccggcgatccgtttcacggcgggccggtgatgctctcattgttggaacggcctcgcccgacttggagtataccgggatccgacaataagtttaaagtgcctggcagaaagttttacgtccaccaccacgcctggaaaaccattaaggacgggaaccatcccacaacaggcaaagctattgaacaaagccctaataaccgcactgtagaagctctcgccggcgggaattcctttagcttcgaaattgcctttgagaacctgaaagaatgggagctgggtttgctcatccacagcctgcaactcgaaaagggtctggcgcataaacttggaatggcaaagtctatgggatttggttcagttgaaattgacgtcgaatcagtgcgcctgagaaaagattggaagcaatggcggaatggcaattccgaaattcccaactggttgggaaaaggatttgctaaactgaaggaatggttccgggacgagctcgattttatagaaaatcttaagaaacttctttggtttcctgagggcgaccaagcaccccgggtttgctaccccatgctgcgaaagaaggacgatcctaatgggaatagcggttacgaagaactcaaaagaggggaattcaagaaagaagatcggcagaagaagctgaccacgccgtggacaccgtgggcaaaacggacagccgacggaagcgagttcgagtcaccaaagaagaagcggaaagtctaa

SEQ ID NO: 200 - DNA, 4914 bp, synthetic construct
  source 1..4914: mol_type = other DNA
atgaaacggacagccgacggaagcgagttcgagtcaccaaagaagaagcggaaagtcacgactactatgaagatttcaattgaattcctcgagccgtttcggatgaccaaatggcaggaaagcactaggcgaaacaagaacaacaaggaatttgttcgcggccaagcttttgcaagatggcatagaaataagaaggataacacaaaagggcggccttacataactgggacattgctgcggtccgcagtaattagaagcgcggaaaacctgctgacattgagtgatgggaaaattagcgaaaagacatgttgtcctgggaaatttgatacggaagataaagacaggttgctgcaattgaggcagcggtccacccttcgttggaccgataagaacccctgtccagataacgctgaaacttactgcccgttttgcgaacttctcgggagatccggtaacgatggaaagaaggctgagaagaaggattggcgctttcgtattcattttggcaatctttcccttccagggaagcccgatttcgacgggccaaaagctataggcagccaacgggtacttaacagggtcgatttcaaatccggtaaggcccatgacttctttaaggcttacgaagtcgaccatactaggtttccccgcttcgaaggggagattaccatagataataaagtcagcgctgaagccaggaaactgctctgtgattctctcaagtttacggatcggctgtgtggagctctgtgcgtaatcaggttcgatgaatatacaccagcagccgatagtgggaaacaaaccgaaaatgtccaagcagaaccgaatgctaatctcgctgaaaagaccgcagagcaaattattagcattctggacgataataagaaaaccgaatatacccgcctgcttgctgatgctattcgttcactccgccgctctagtaaacttgtcgctggcttgccaaaggatcatgacgggaaggatgaccataagctctgggatatcggcaagaagaagaaagacgaaaactctgtcactattaggcaaatccttacgacctcagcagacaccaaggaactcaagaatgccggaaaatggagagaattctgcgagaagctgggtgaagcgctgtacctcaagagtaaagacatgagtggcggcctgaaaattactcggagaatactgggcgatgctgaattccatggaaagcccgatcggcttgaaaagagccggtctgtgtcaatcggatctgtgttgaaagaaactgtggtatgcggcgaactggtcgctaaaacgcccttcttcttcggagcgatagacgaagatgcaaaacaaaccgacctgcaagtactcctcactcccgataacaagtatagactgccaagaagcgccgtgcgaggtatactccgtcgagatcttcaaacctattttgatagcccatgcaatgctgagttgggtggacggccatgcatgtgtaagacgtgtaggattatgagagggatcacggtgatggatgcgcgcagtgagtacaatgccccgccagaaataaggcatcgtacccgcattaatcccttcacaggcacggttgcggaaggtgccctgtttaatatggaagtagcccccgaggggattgtctttccatttcaactccggtaccggggctctgaagatgggctgcccgatgcactgaaaacggtgttgaaatggtgggctgaggggcaggcattcatgagtggcgctgcctcaaccgggaagggccgattccggatggaaaatgctaaatatgaaacgctggatctgagcgacgagaatcaaaggaatgactatcttaagaattggggatggcgtgacgagaaggggctcgaggaactgaagaaacgactgaactcaggtctgccagagcccggtaattatagggatccaaaatggcacgagattaacgtttccattgagatggcaagcccttttattaatggcgacccaatccgcgcagccgtggacaaacgtggtacagatgtggttaccttcgttaagtataaagctgaaggggaagaggcgaaacccgtatgtgcatacaaggccgaatcttttagaggggtgatcagaagtgccgtggcacgcattcatatggaagatggcgtccctttgactgagttgactcacagtgactgtgaatgtctcctgtgccaaatctttggaagtgagtatgaagccggcaaaataaggtttgaagatctcgtattcgaaagtgacccggaacctgtgaccttcgatcatgtggccatcgatagattcactggcggtgcagctgataagaagaaattcgatgattcccctctgcccggtagccctgcaagaccgctcatgttgaaaggctccttctggatccgcagggacgttctcgaggacgaagagtactgtaaggcactcggtaaggctcttgcagatgtgaataatggcctttatcccctcggtggaaagagcgccatcggctacggacaggtcaagagtctgggtataaagggagatgataagaggatttctcgcctcatgaatcctgcctttgatgagacagatgtagccgttccagaaaagcccaaaactgatgccgaggttcgcatcgaggcagagaaagtatattacccacactatttcgtcgaaccccataagaaggtggaacgcgaggagaaaccctgtggtcatcaaaagttccacgaggggcgactgacaggtaaaattcggtgtaagctcattaccaagacacccctcatcgtcccagatactagtaatgacgatttcttcagacctgcggataaagaagctcggaaggaaaaggacgaatatcataaatcatatgctttcttcagacttcataaacaaatcatgattcccgggagcgaattgagaggaatggtgagtagtgtctacgaaactgtgacaaattcttgcttcaggatatttgatgagactaaacggttgtcatggcggatggatgctaagcaccagaatgtgctgcaaaagtttctcccaggtcgagtgaccgccgatgggaaacatatacaaaagttttccgaaactgcaagggtgcctttctatgacaaaacgcagaaacattttgacattcttgatgagcaagaaattgctggtgagaaacctgttcggatgtgggtcaagcgttttattaaacgactgagcctcgttgatcctgctaaacacccccagaagaaacaagacaataaatggaaaagacgcaaagaaggcatcgccacatttatagagcaaaagaatggctcttattattttaacgtggtcaccaataatggctgcacttctttccacttgtggcataaacctgacaattttgaccaggagaaactcgaaggcatacagaatggtgagaaactggattgctgggtaagagatagtagataccaaaaggcctttcaagagatacccgagaacgacccagacggatgggagtgtaaagagggctaccttcatgtcgtcggccccagcaaagtagagtttagtgacaagaaaggggatgtgatcaataactttcaaggaacactcccatcagttcccaacgactggaaaacaattaggacgaacgattttaagaataggaaaaggaagaatgaacctgtgttttgttgtgaggatgataagggcaattactataccatggctaaatattgcgaaaccttcttcttcgatctgaaggagaacgaggaatacgagatccccgagaaagcaagaatcaaatacaaagaactgctcagggtctataacaacaatcctcaagcagtgccggagagcgtatttcagtctagagttgcccgggaaaacgtggaaaagctgaagtccggagatcttgtgtatttcaaacataatgaaaagtacgtagaggacatcgtcccagtgcggatttcccgaactgtagacgataggatgatcggcaaacgtatgagcgccgatctgcggccgtgccatggagattgggtggaagatggtgatctcagtgccttgaatgcatatcccgagaaaagactcctcttgcgccaccccaaaggactctgccctgcttgccggctctttggaaccggatcttacaagggcagagtcaggtttggattcgcgtcactcgaaaacgatccggagtggctgatcccaggcaagaatcccggcgatccgtttcacggcgggccggtgatgctctcattgttggaacggcctcgcccgacttggagtataccgggatccgacaataagtttaaagtgcctggcagaaagttttacgtccaccaccacgcctggaaaaccattaaggacgggaaccatcccacaacaggcaaagctattgaacaaagccctaataaccgcactgtagaagctctcgccggcgggaattcctttagcttcgaaattgcctttgagaacctgaaagaatgggagctgggtttgctcatccacagcctgcaactcgaaaagggtctggcgcataaacttggaatggcaaagtctatgggatttggttcagttgaaattgacgtcgaatcagtgcgcctgagaaaagattggaagcaatggcggaatggcaattccgaaattcccaactggttgggaaaaggatttgctaaactgaaggaatggttccgggacgagctcgattttatagaaaatcttaagaaacttctttggtttcctgagggcgaccaagcaccccgggtttgctaccccatgctgcgaaagaaggacgatcctaatgggaatagcggttacgaagaactcaaaagaggggaattcaagaaagaagatcggcagaagaagctgaccacgccgtggacaccgtgggcaaaacggacagccgacggaagcgagttcgagtcaccaaagaagaagcggaaagtctaa

SEQ ID NO: 201 - DNA, 4914 bp, synthetic construct
  source 1..4914: mol_type = other DNA
atgaaacggacagccgacggaagcgagttcgagtcaccaaagaagaagcggaaagtcacgactactatgaagatttcaattgaattcctcgagccgtttcggatgaccaaatggcaggaaagcactaggcgaaacaagaacaacaaggaatttgttcgcggccaagcttttgcaagatggcatagaaataagaaggataacacaaaagggcggccttacataactgggacattgctgcggtccgcagtaattagaagcgcggaaaacctgctgacattgagtgatgggaaaattagcgaaaagacatgttgtcctgggaaatttgatacggaagataaagacaggttgctgcaattgaggcagcggtccacccttcgttggaccgataagaacccctgtccagataacgctgaaacttactgcccgttttgcgaacttctcgggagatccggtaacgatggaaagaaggctgagaagaaggattggcgctttcgtattcattttggcaatctttcccttccagggaagcccgatttcgacgggccaaaagctataggcagccaacgggtacttaacagggtcgatttcaaatccggtaaggcccatgacttctttaaggcttacgaagtcgaccatactaggtttccccgcttcgaaggggagattaccatagataataaagtcagcgctgaagccaggaaactgctctgtgattctctcaagtttacggatcggctgtgtggagctctgtgcgtaatcaggttcgatgaatatacaccagcagccgatagtgggaaacaaaccgaaaatgtccaagcagaaccgaatgctaatctcgctgaaaagaccgcagagcaaattattagcattctggacgataataagaaaaccgaatatacccgcctgcttgctgatgctattcgttcactccgccgctctagtaaacttgtcgctggcttgccaaaggatcatgacgggaaggatgaccataagctctgggatatcggcaagaagaagaaagacgaaaactctgtcactattaggcaaatccttacgacctcagcagacaccaaggaactcaagaatgccggaaaatggagagaattctgcgagaagctgggtgaagcgctgtacctcaagagtaaagacatgagtggcggcctgaaaattactcggagaatactgggcgatgctgaattccatggaaagcccgatcggcttgaaaagagccggtctgtgtcaatcggatctgtgttgaaagaaactgtggtatgcggcgaactggtcgctaaaacgcccttcttcttcggagcgatagacgaagatgcaaaacaaaccgacctgcaagtactcctcactcccgataacaagtatagactgccaagaagcgccgtgcgaggtatactccgtcgagatcttcaaacctattttgatagcccatgcaatgctgagttgggtggacggccatgcatgtgtaagacgtgtaggattatgagagggatcacggtgatggatgcgcgcagtgagtacaatgccccgccagaaataaggcatcgtacccgcattaatcccttcacaggcacggttgcggaaggtgccctgtttaatatggaagtagcccccgaggggattgtctttccatttcaactccggtaccggggctctgaagatgggctgcccgatgcactgaaaacggtgttgaaatggtgggctgaggggcaggcattcatgagtggcgctgcctcaaccgggaagggccgattccggatggaaaatgctaaatatgaaacgctggatctgagcgacgagaatcaaaggaatgactatcttaagaattggggatggcgtgacgagaaggggctcgaggaactgaagaaacgactgaactcaggtctgccagagcccggtaattatagggatccaaaatggcacgagattaacgtttccattgagatggcaagcccttttattaatggcgacccaatccgcgcagccgtggacaaacgtggtacagatgtggttaccttcgttaagtataaagctgaaggggaagaggcgaaacccgtatgtgcatacaaggccgaatcttttagaggggtgatcagaagtgccgtggcacgcattcatatggaagatggcgtccctttgactgagttgactcacagtgactgtgaatgtctcctgtgccaaatctttggaagtgagtatgaagccggcaaaataaggtttgaagatctcgtattcgaaagtgacccggaacctgtgaccttcgatcatgtggccatcgatagattcactggcggtgcagctgataagaagaaattcgatgattcccctctgcccggtagccctgcaagaccgctcatgttgaaaggctccttctggatccgcagggacgttctcgaggacgaagagtactgtaaggcactcggtaaggctcttgcagatgtgaataatggcctttatcccctcggtggaaagagcgccatcggctacggacaggtcaagagtctgggtataaagggagatgataagaggatttctcgcctcatgaatcctgcctttgatgagacagatgtagccgttccagaaaagcccaaaactgatgccgaggttcgcatcgaggcagagaaagtatattacccacactatttcgtcgaaccccataagaaggtggaacgcgaggagaaaccctgtggtcatcaaaagttccacgaggggcgactgacaggtaaaattcggtgtaagctcattaccaagacacccctcatcgtcccagatactagtaatgacgatttcttcagacctgcggataaagaagctcggaaggaaaaggacgaatatcataaatcatatgctttcttcagacttcataaacaaatcatgattcccgggagcgaattgagaggaatggtgagtagtgtctacgaaactgtgacaaattcttgcttcaggatatttgatgagactaaacggttgtcatggcggatggatgctgatcaccagaatgtgctgcaaaagtttctcccaggtcgagtgaccgccgatgggaaacatatacaaaagttttccgaaactgcaagggtgcctttctatgacaaaacgcagaaacattttgacattcttgatgagcaagaaattgctggtgagaaacctgttcggatgtgggtcaagcgttttattaaacgactgagcctcgttgatcctgctaaacacccccagaagaaacaagacaataaatggaaaagacgcaaagaaggcatcgccacatttatagagcaaaagaatggctcttattattttaacgtggtcaccaataatggctgcacttctttccacttgtggcataaacctgacaattttgaccaggagaaactcgaaggcatacagaatggtgagaaactggattgctgggtaagagatagtagataccaaaaggcctttcaagagatacccgagaacgacccagacggatgggagtgtaaagagggctaccttcatgtcgtcggccccagcaaagtagagtttagtgacaagaaaggggatgtgatcaataactttcaaggaacactcccatcagttcccaacgactggaaaacaattaggacgaacgattttaagaataggaaaaggaagaatgaacctgtgttttgttgtgaggatgataagggcaattactataccatggctaaatattgcgaaaccttcttcttcgatctgaaggagaacgaggaatacgagatccccgagaaagcaagaatcaaatacaaagaactgctcagggtctataacaacaatcctcaagcagtgccggagagcgtatttcagtctagagttgcccgggaaaacgtggaaaagctgaagtccggagatcttgtgtatttcaaacataatgaaaagtacgtagaggacatcgtcccagtgcggatttcccgaactgtagacgataggatgatcggcaaacgtatgagcgccgatctgcggccgtgccatggagattgggtggaagatggtgatctcagtgccttgaatgcatatcccgagaaaagactcctcttgcgccaccccaaaggactctgccctgcttgccggctctttggaaccggatcttacaagggcagagtcaggtttggattcgcgtcactcgaaaacgatccggagtggctgatcccaggcaagaatcccggcgatccgtttcacggcgggccggtgatgctctcattgttggaacggcctcgcccgacttggagtataccgggatccgacaataagtttaaagtgcctggcagaaagttttacgtccaccaccacgcctggaaaaccattaaggacgggaaccatcccacaacaggcaaagctattgaacaaagccctaataaccgcactgtagaagctctcgccggcgggaattcctttagcttcgaaattgcctttgagaacctgaaagaatgggagctgggtttgctcatccacagcctgcaactcgaaaagggtctggcgcataaacttggaatggcaaagtctatgggatttggttcagttgaaattgacgtcgaatcagtgcgcctgagaaaagattggaagcaatggcggaatggcaattccgaaattcccaactggttgggaaaaggatttgctaaactgaaggaatggttccgggacgagctcgattttatagaaaatcttaagaaacttctttggtttcctgagggcgaccaagcaccccgggtttgctaccccatgctgcgaaagaaggacgatcctaatgggaatagcggttacgaagaactcaaaagaggggaattcaagaaagaagatcggcagaagaagctgaccacgccgtggacaccgtgggcaaaacggacagccgacggaagcgagttcgagtcaccaaagaagaagcggaaagtctaa

SEQ ID NO: 202 - DNA, 4065 bp, synthetic construct
  source 1..4065: mol_type = other DNA
atgaaacggacagccgacggaagcgagttcgagtcaccaaagaagaagcggaaagtcacgactactatgaagatttcaattgaattcctcgagccgtttcggatgaccaaatggcaggaaagcactaggcgaaacaagaacaacaaggaatttgttcgcggccaagcttttgcaagatggcatagaaataagaaggataacacaaaagggcggccttacataactgggacattgctgcggtccgcagtaattagaagcgcggaaaacctgctgacattgagtgatgggaaaattagcgaaaagacatgttgtcctgggaaatttgatacggaagataaagacaggttgctgcaattgaggcagcggtccacccttcgttggaccgataagaacccctgtccagataacgctgaaacttactgcccgttttgcgaacttctcgggagatccggtaacgatggaaagaaggctgagaagaaggattggcgctttcgtattcattttggcaatctttcccttccagggaagcccgatttcgacgggccaaaagctataggcagccaacgggtacttaacagggtcgatttcaaatccggtaaggcccatgacttctttaaggcttacgaagtcgaccatactaggtttccccgcttcgaaggggagattaccatagataataaagtcagcgctgaagccaggaaactgctctgtgattctctcaagtttacggatcggctgtgtggagctctgtgcgtaatcaggttcgatgaatatacaccagcagccgatagtgggaaacaaaccgaaaatgtccaagcagaaccgaatgctaatctcgctgaaaagaccgcagagcaaattattagcattctggacgataataagaaaaccgaatatacccgcctgcttgctgatgctattcgttcactccgccgctctagtaaacttgtcgctggcttgccaaaggatcatgacgggaaggatgaccataagctctgggatatcggcaagaagaagaaagacgaaaactctgtcactattaggcaaatccttacgacctcagcagacaccaaggaactcaagaatgccggaaaatggagagaattctgcgagaagctgggtgaagcgctgtacctcaagagtaaagacatgagtggcggcctgaaaattactcggagaatactgggcgatgctgaattccatggaaagcccgatcggcttgaaaagagccggtctgtgtcaatcggatctgtgttgaaagaaactgtggtatgcggcgaactggtcgctaaaacgcccttcttcttcggagcgatagacgaagatgcaaaacaaaccgacctgcaagtactcctcactcccgataacaagtatagactgccaagaagcgccgtgcgaggtatactccgtcgagatcttcaaacctattttgatagcccatgcaatgctgagttgggtggacggccatgcatgtgtaagacgtgtaggattatgagagggatcacggtgatggatgcgcgcagtgagtacaatgccccgccagaaataaggcatcgtacccgcattaatcccttcacaggcacggttgcggaaggtgccctgtttaatatggaagtagcccccgaggggattgtctttccatttcaactccggtaccggggctctgaagatgggctgcccgatgcactgaaaacggtgttgaaatggtgggctgaggggcaggcattcatgagtggcgctgcctcaaccgggaagggccgattccggatggaaaatgctaaatatgaaacgctggatctgagcgacgagaatcaaaggaatgactatcttaagaattggggatggcgtgacgagaaggggctcgaggaactgaagaaacgactgaactcaggtctgccagagcccggtaattatagggatccaaaatggcacgagattaacgtttccattgagatggcaagcccttttattaatggcgacccaatccgcgcagccgtggacaaacgtggtacagatgtggttaccttcgttaagtataaagctgaaggggaagaggcgaaacccgtatgtgcatacaaggccgaatcttttagaggggtgatcagaagtgccgtggcacgcattcatatggaagatggcgtccctttgactgagttgactcacagtgactgtgaatgtctcctgtgccaaatctttggaagtgagtatgaagccggcaaaataaggtttgaagatctcgtattcgaaagtgacccggaacctgtgaccttcgatcatgtggccatcgatagattcactggcggtgcagctgataagaagaaattcgatgattcccctctgcccggtagccctgcaagaccgctcatgttgaaaggctccttctggatccgcagggacgttctcgaggacgaagagtactgtaaggcactcggtaaggctcttgcagatgtgaataatggcctttatcccctcggtggaaagagcgccatcggctacggacaggtcaagagtctgggtataaagggagatgataagaggatttctcgcctcatgaatcctgcctttgatgagacagatgtagccgttccagaaaagcccaaaactgatgccgaggttcgcatcgaggcagagaaagtatattacccacactatttcgtcgaaccccataagaaggtggaacgcgaggagaaaccctgtggtcatcaaaagttccacgaggggcgactgacaggtaaaattcggtgtaagctcattaccaagacacccctcatcgtcccagatactagtaatgacgatttcttcagacctgcggataaagaagctcggaaggaaaaggacgaatatcataaatcatatgctttcttcagacttcataaacaaatcatgattcccgggagcgaattgagaggaatggtgagtagtgtctacgaaactgtgacaaattcttgcttcaggatatttgatgagactaaacggttgtcatggcggatggatgctgatcaccagaatgtgctgcaaaagtttctcccaggtcgagtgaccgccgatgggaaacatatacaaaagttttccgggggtgggtcacgaactgtagacgataggatgatcggcaaacgtatgagcgccgatctgcggccgtgccatggagattgggtggaagatggtgatctcagtgccttgaatgcatatcccgagaaaagactcctcttgcgccaccccaaaggactctgccctgcttgccggctctttggaaccggatcttacaagggcagagtcaggtttggattcgcgtcactcgaaaacgatccggagtggctgatcccaggcaagaatcccggcgatccgtttcacggcgggccggtgatgctctcattgttggaacggcctcgcccgacttggagtataccgggatccgacaataagtttaaagtgcctggcagaaagttttacgtccaccaccacgcctggaaaaccattaaggacgggaaccatcccacaacaggcaaagctattgaacaaagccctaataaccgcactgtagaagctctcgccggcgggaattcctttagcttcgaaattgcctttgagaacctgaaagaatgggagctgggtttgctcatccacagcctgcaactcgaaaagggtctggcgcataaacttggaatggcaaagtctatgggatttggttcagttgaaattgacgtcgaatcagtgcgcctgagaaaagattggaagcaatggcggaatggcaattccgaaattcccaactggttgggaaaaggatttgctaaactgaaggaatggttccgggacgagctcgattttatagaaaatcttaagaaacttctttggtttcctgagggcgaccaagcaccccgggtttgctaccccatgctgcgaaagaaggacgatcctaatgggaatagcggttacgaagaactcaaaagaggggaattcaagaaagaagatcggcagaagaagctgaccacgccgtggacaccgtgggcaaaacggacagccgacggaagcgagttcgagtcaccaaagaagaagcggaaagtctaa

SEQ ID NO: 203 - DNA, 48 bp, synthetic construct
  source 1..48: mol_type = other DNA
tctggcagcgagacaccaggaacaagcgagtcagcaacaccagagagc

SEQ ID NO: 204 - DNA, 45 bp, synthetic construct
  source 1..45: mol_type = other DNA
ggatccggtgggtccggtagtggtggttccgggtccggtggaagt

SEQ ID NO: 205 - DNA, 47 bp, synthetic construct
  source 1..47: mol_type = other DNA
gttgatgtcacggaacggtaatgcctggcttgtcgacgcatagtctg

SEQ ID NO: 206 - DNA, 61 bp, synthetic construct
  source 1..61: mol_type = other DNA
atttagactaccccaaaaacgaaggggacttggctcacgcctgtaatgccagcactttgag

SEQ ID NO: 207 - DNA, 61 bp, synthetic construct
  source 1..61: mol_type = other DNA
atttagactaccccaaaaacgaaggggactgtatccccaagagaaggctccctgttggcca

SEQ ID NO: 208 - DNA, 61 bp, synthetic construct
  source 1..61: mol_type = other DNA
atttagactaccccaaaaacgaaggggactcaaaacctcaaaaaagatacatgcaggacct

SEQ ID NO: 209 - DNA, 61 bp, synthetic construct
  source 1..61: mol_type = other DNA
atttagactaccccaaaaacgaaggggactagaaaatataaagtttctgaggagaattcaa

SEQ ID NO: 210 - DNA, 61 bp, synthetic construct
  source 1..61: mol_type = other DNA
atttagactaccccaaaaacgaaggggactacaaaaaaacagaagtaaagaaagatttcct

SEQ ID NO: 211 - DNA, 61 bp, synthetic construct
  source 1..61: mol_type = other DNA
atttagactaccccaaaaacgaaggggactggtccgctgccgttcgcttgggacatcctgt

SEQ ID NO: 212 - DNA, 61 bp, synthetic construct
  source 1..61: mol_type = other DNA
gttgtggaaggtccagttttgaggggctattggctcacgcctgtaatgccagcactttgag

SEQ ID NO: 213 - DNA, 61 bp, synthetic construct
  source 1..61: mol_type = other DNA
gttgtggaaggtccagttttgaggggctatgtatccccaagagaaggctccctgttggcca

SEQ ID NO: 214 - DNA, 61 bp, synthetic construct
  source 1..61: mol_type = other DNA
gttgtggaaggtccagttttgaggggctatcaaaacctcaaaaaagatacatgcaggacct

SEQ ID NO: 215 - DNA, 61 bp, synthetic construct
  source 1..61: mol_type = other DNA
gttgtggaaggtccagttttgaggggctatagaaaatataaagtttctgaggagaattcaa

SEQ ID NO: 216 - DNA, 61 bp, synthetic construct
  source 1..61: mol_type = other DNA
gttgtggaaggtccagttttgaggggctatacaaaaaaacagaagtaaagaaagatttcct

SEQ ID NO: 217 - DNA, 61 bp, synthetic construct
  source 1..61: mol_type = other DNA
gttgtggaaggtccagttttgaggggctatggtccgctgccgttcgcttgggacatcctgt

SEQ ID NO: 218 - DNA, 61 bp, synthetic construct
  source 1..61: mol_type = other DNA
aacccctaccaactggtcggggtttgaaactggctcacgcctgtaatgccagcactttgag

SEQ ID NO: 219 - DNA, 61 bp, synthetic construct
  source 1..61: mol_type = other DNA
aacccctaccaactggtcggggtttgaaacgtatccccaagagaaggctccctgttggcca

SEQ ID NO: 220 - DNA, 61 bp, synthetic construct
  source 1..61: mol_type = other DNA
aacccctaccaactggtcggggtttgaaaccaaaacctcaaaaaagatacatgcaggacct

SEQ ID NO: 221 - DNA, 61 bp, synthetic construct
  source 1..61: mol_type = other DNA
aacccctaccaactggtcggggtttgaaacagaaaatataaagtttctgaggagaattcaa

SEQ ID NO: 222 - DNA, 61 bp, synthetic construct
  source 1..61: mol_type = other DNA
aacccctaccaactggtcggggtttgaaacacaaaaaaacagaagtaaagaaagatttcct

SEQ ID NO: 223 - DNA, 61 bp, synthetic construct
  source 1..61: mol_type = other DNA
aacccctaccaactggtcggggtttgaaacggtccgctgccgttcgcttgggacatcctgt

SEQ ID NO: 224 - DNA, 47 bp, synthetic construct
  source 1..47: mol_type = other DNA
gttgatgtcacggaacgtttcttccctcaaatgaaagtataaattgt

SEQ ID NO: 225 - DNA, 47 bp, synthetic construct
  source 1..47: mol_type = other DNA
gttgatgtcacggaacgccaagggtgaggaggaggaagagggtgacc

SEQ ID NO: 226 - DNA, 47 bp, synthetic construct
  source 1..47: mol_type = other DNA
gttgatgtcacggaactttaacaatatttattgagcacttgctatgt

SEQ ID NO: 227 - DNA, 47 bp, synthetic construct
  source 1..47: mol_type = other DNA
gttgatgtcacggaacaggcgccgggttggcaagtgggcagggaaca

SEQ ID NO: 228 - DNA, 47 bp, synthetic construct
  source 1..47: mol_type = other DNA
gttgatgtcacggaacagtgtgtgatacttgaaaggtctagccatct

SEQ ID NO: 229 - DNA, 47 bp, synthetic construct
  source 1..47: mol_type = other DNA
gttgatgtcacggaacctttatacaacttaggtcccacactagtgtg

SEQ ID NO: 230 - DNA, 47 bp, synthetic construct
  source 1..47: mol_type = other DNA
gttgatgtcacggaaccgggggcttctggtatttgtctttgctttat

SEQ ID NO: 231 - DNA, 47 bp, synthetic construct
  source 1..47: mol_type = other DNA
gttgatgtcacggaacgaattcttttatatgtgagaaatttcggggg

SEQ ID NO: 232 - DNA, 47 bp, synthetic construct
  source 1..47: mol_type = other DNA
gttgatgtcacggaacctcataggatttttaccgtcaccaaaatcag

SEQ ID NO: 233 - DNA, 47 bp, synthetic construct
  source 1..47: mol_type = other DNA
gttgatgtcacggaacgaaaagggtctggagctttcattagattctc

SEQ ID NO: 234 - DNA, 47 bp, synthetic construct
  source 1..47: mol_type = other DNA
gttgatgtcacggaacgggtatagataagcatgttttccaagaaaag

SEQ ID NO: 235 - DNA, 47 bp, synthetic construct
  source 1..47: mol_type = other DNA
gttgatgtcacggaacatattgttatcctgtagtccaaggagggtat

SEQ ID NO: 236 - DNA, 47 bp, synthetic construct
  source 1..47: mol_type = other DNA
gttgatgtcacggaacgaaaaacgtttgagtgttttctccctggagc

SEQ ID NO: 237 - DNA, 47 bp, synthetic construct
  source 1..47: mol_type = other DNA
gttgatgtcacggaacgaaatcttaaaagatctttaggagaaaaacg

SEQ ID NO: 238 - DNA, 47 bp, synthetic construct
  source 1..47: mol_type = other DNA
gttgatgtcacggaaccaaaacttaggagaaacatttggtttggaaa

SEQ ID NO: 239 - DNA, 47 bp, synthetic construct
  source 1..47: mol_type = other DNA
gttgatgtcacggaaccccaggaggagggaagttccttggacaaaac

SEQ ID NO: 240 - DNA, 47 bp, synthetic construct
  source 1..47: mol_type = other DNA
gttgatgtcacggaacccaaaagtaggttcacactttggacctcatt

SEQ ID NO: 241 - DNA, 47 bp, synthetic construct
  source 1..47: mol_type = other DNA
gttgatgtcacggaactgacagccattggtgaactcgtgccctgtgc

SEQ ID NO: 242 - DNA, 47 bp, synthetic construct
  source 1..47: mol_type = other DNA
gttgatgtcacggaacagaaggcgccgggttggcaagtgggcaggga

SEQ ID NO: 243 - DNA, 47 bp, synthetic construct
  source 1..47: mol_type = other DNA
gttgatgtcacggaacgagcctagaaggcgccgggttggcaagtggg

SEQ ID NO: 244 - DNA, 47 bp, synthetic construct
  source 1..47: mol_type = other DNA
gttgatgtcacggaaccctagaaggcgccgggttggcaagtgggcag

SEQ ID NO: 245 - DNA, 47 bp, synthetic construct
  source 1..47: mol_type = other DNA
gttgatgtcacggaaccgccgggttggcaagtgggcagggaacagag

SEQ ID NO: 246 - DNA, 47 bp, synthetic construct
  source 1..47: mol_type = other DNA
gttgatgtcacggaaccgggttggcaagtgggcagggaacagagaca

SEQ ID NO: 247 - DNA, 47 bp, synthetic construct
  source 1..47: mol_type = other DNA
gttgatgtcacggaacgttggcaagtgggcagggaacagagacatgc

SEQ ID NO: 248 - DNA, 47 bp, synthetic construct
  source 1..47: mol_type = other DNA
gttgatgtcacggaaccatggagtataacggtttattcatagtagtc

SEQ ID NO: 249 - DNA, 47 bp, synthetic construct
  source 1..47: mol_type = other DNA
gttgatgtcacggaacaccgttatactccatgttgcgggcagaatgg

SEQ ID NO: 250 - DNA, 47 bp, synthetic construct
  source 1..47: mol_type = other DNA
gttgatgtcacggaactgttgcgggcagaatggggatctggacaggg

SEQ ID NO: 251 - DNA, 47 bp, synthetic construct
  source 1..47: mol_type = other DNA
gttgatgtcacggaacgatctggacagggaagcacagggcacgagtt

SEQ ID NO: 252 - DNA, 47 bp, synthetic construct
  source 1..47: mol_type = other DNA
gttgatgtcacggaacgagttcaccaatggctgtcaagctacgctgc

SEQ ID NO: 253 - DNA, 47 bp, synthetic construct
  source 1..47: mol_type = other DNA
gttgatgtcacggaacctgtcaagctacgctgctcacagaaaaaaca

SEQ ID NO: 254 - DNA, 47 bp, synthetic construct
  source 1..47: mol_type = other DNA
gttgatgtcacggaacctgctcacagaaaaaacagatgatgttacta

SEQ ID NO: 255 - DNA, 47 bp, synthetic construct
  source 1..47: mol_type = other DNA
gttgatgtcacggaactaaaatgggggaaatgaactgctttagtaac

SEQ ID NO: 256 - DNA, 47 bp, synthetic construct
  source 1..47: mol_type = other DNA
gttgatgtcacggaactccctcccacattaaatcaaacgtccacata

SEQ ID NO: 257 - DNA, 47 bp, synthetic construct
  source 1..47: mol_type = other DNA
gttgatgtcacggaacctttactctgcaagataaggtcaacaaaatg

SEQ ID NO: 258 - DNA, 47 bp, synthetic construct
  source 1..47: mol_type = other DNA
gttgatgtcacggaacagaactaggatttcagatacccagcttgctt

SEQ ID NO: 259 - DNA, 47 bp, synthetic construct
  source 1..47: mol_type = other DNA
gttgatgtcacggaacggttcacactttggacctcattttcatctaa

SEQ ID NO: 260 - DNA, 47 bp, synthetic construct
  source 1..47: mol_type = other DNA
gttgatgtcacggaacgatacaggaacctcagggagagataagacta

SEQ ID NO: 261 - DNA, 47 bp, synthetic construct
  source 1..47: mol_type = other DNA
gttgatgtcacggaacaataccaggaggcagaattcaggcatcctgc

SEQ ID NO: 262 - DNA, 288 bp, synthetic construct
  source 1..288: mol_type = other DNA
gaacagaaaatataaagtttctgaggagaattcaaatgaagccaaaacctcaaaaaagatacatgcaggacctgcaggcagtatccccaagagaaggctccctgttggccaggtgcagtggctcacgcctgtaatgccagcactttgagaacgaggaattctcttcttttttttctgcaggttctagaacagaaaatgaaagtggtagagaatctccaggatgactttgatttcaactataaaaccctcaagagtcaaggagactacaaagacgatgacgacaagtaa

SEQ ID NO: 263 - DNA, 288 bp, synthetic construct
  source 1..288: mol_type = other DNA
gaacagaaaatataaagtttctgaggagaattcaaatgaagccaaaacctcaaaaaagatacatgcaggacctgcaggcagtatccccaagagaaggctccctgttggccaggtgcagtggctcacgcctgtaatgccagcactttgagaacgaggaattctcttcttttttttctgcaggctctagaacagaaaatgaaagtggtagagaatctccaggatgactttgatttcaactataaaaccctcaagagtcaaggagactacaaagacgatgacgacaagtaa

SEQ ID NO: 264 - DNA, 288 bp, synthetic construct
  source 1..288: mol_type = other DNA
gaacagaaaatataaagtttctgaggagaattcaaatgaagccaaaacctcaaaaaagatacatgcaggacctgcaggcagtatccccaagagaaggctccctgttggccaggtgcagtggctcacgcctgtaatgccagcactttgagaacgaggaattctcttcttttttttctgcagggtctagaacagaaaatgaaagtggtagagaatctccaggatgactttgatttcaactataaaaccctcaagagtcaaggagactacaaagacgatgacgacaagtaa

SEQ ID NO: 265 - DNA, 288 bp, synthetic construct
  source 1..288: mol_type = other DNA
gaacagaaaatataaagtttctgaggagaattcaaatgaagccaaaacctcaaaaaagatacatgcaggacctgcaggcagtatccccaagagaaggctccctgttggccaggtgcagtggctcacgcctgtaatgccagcactttgagaacgaggaattctcttcttttttttctgcaggaactagaacagaaaatgaaagtggtagagaatctccaggatgactttgatttcaactataaaaccctcaagagtcaaggagactacaaagacgatgacgacaagtaa

SEQ ID NO: 266 - DNA, 288 bp, synthetic construct
  source 1..288: mol_type = other DNA
gaacagaaaatataaagtttctgaggagaattcaaatgaagccaaaacctcaaaaaagatacatgcaggacctgcaggcagtatccccaagagaaggctccctgttggccaggtgcagtggctcacgcctgtaatgccagcactttgagaacgaggaattctcttcttttttttctgcaggacctagaacagaaaatgaaagtggtagagaatctccaggatgactttgatttcaactataaaaccctcaagagtcaaggagactacaaagacgatgacgacaagtaa

SEQ ID NO: 267 - DNA, 288 bp, synthetic construct
  source 1..288: mol_type = other DNA
gaacagaaaatataaagtttctgaggagaattcaaatgaagccaaaacctcaaaaaagatacatgcaggacctgcaggcagtatccccaagagaaggctccctgttggccaggtgcagtggctcacgcctgtaatgccagcactttgagaacgaggaattctcttcttttttttctgcaggagctagaacagaaaatgaaagtggtagagaatctccaggatgactttgatttcaactataaaaccctcaagagtcaaggagactacaaagacgatgacgacaagtaa

SEQ ID NO: 268 - DNA, 288 bp, synthetic construct
  source 1..288: mol_type = other DNA
gaacagaaaatataaagtttctgaggagaattcaaatgaagccaaaacctcaaaaaagatacatgcaggacctgcaggcagtatccccaagagaaggctccctgttggccaggtgcagtggctcacgcctgtaatgccagcactttgagaacgaggaattctcttcttttttttctgcaggatttagaacagaaaatgaaagtggtagagaatctccaggatgactttgatttcaactataaaaccctcaagagtcaaggagactacaaagacgatgacgacaagtaa

SEQ ID NO: 269 - DNA, 288 bp, synthetic construct
  source 1..288: mol_type = other DNA
gaacagaaaatataaagtttctgaggagaattcaaatgaagccaaaacctcaaaaaagatacatgcaggacctgcaggcagtatccccaagagaaggctccctgttggccaggtgcagtggctcacgcctgtaatgccagcactttgagaacgaggaattctcttcttttttttctgcaggatgtagaacagaaaatgaaagtggtagagaatctccaggatgactttgatttcaactataaaaccctcaagagtcaaggagactacaaagacgatgacgacaagtaa

SEQ ID NO: 270 - DNA, 288 bp, synthetic construct
  source 1..288: mol_type = other DNA
gaacagaaaatataaagtttctgaggagaattcaaatgaagccaaaacctcaaaaaagatacatgcaggacctgcaggcagtatccccaagagaaggctccctgttggccaggtgcagtggctcacgcctgtaatgccagcactttgagaacgaggaattctcttcttttttttctgcaggatatagaacagaaaatgaaagtggtagagaatctccaggatgactttgatttcaactataaaaccctcaagagtcaaggagactacaaagacgatgacgacaagtaa

SEQ ID NO: 271 - DNA, 288 bp, synthetic construct
  source 1..288: mol_type = other DNA
gaacagaaaatataaagtttctgaggagaattcaaatgaagccaaaacctcaaaaaagatacatgcaggacctgcaggcagtatccccaagagaaggctccctgttggccaggtgcagtggctcacgcctgtaatgccagcactttgagaacgaggaattctcttcttttttttctgcagaatctagaacagaaaatgaaagtggtagagaatctccaggatgactttgatttcaactataaaaccctcaagagtcaaggagactacaaagacgatgacgacaagtaa

SEQ ID NO: 272 - DNA, 288 bp, synthetic construct
  source 1..288: mol_type = other DNA
gaacagaaaatataaagtttctgaggagaattcaaatgaagccaaaacctcaaaaaagatacatgcaggacctgcaggcagtatccccaagagaaggctccctgttggccaggtgcagtggctcacgcctgtaatgccagcactttgagaacgaggaattctcttcttttttttctgcagtatctagaacagaaaatgaaagtggtagagaatctccaggatgactttgatttcaactataaaaccctcaagagtcaaggagactacaaagacgatgacgacaagtaa

SEQ ID NO: 273 - DNA, 288 bp, synthetic construct
  source 1..288: mol_type = other DNA
gaacagaaaatataaagtttctgaggagaattcaaatgaagccaaaacctcaaaaaagatacatgcaggacctgcaggcagtatccccaagagaaggctccctgttggccaggtgcagtggctcacgcctgtaatgccagcactttgagaacgaggaattctcttcttttttttctgcagcatctagaacagaaaatgaaagtggtagagaatctccaggatgactttgatttcaactataaaaccctcaagagtcaaggagactacaaagacgatgacgacaagtaa

SEQ ID NO: 274 - DNA, 288 bp, synthetic construct
  source 1..288: mol_type = other DNA
gaacagaaaatataaagtttctgaggagaattcaaatgaagccaaaacctcaaaaaagatacatgcaggacctgcaggcagtatccccaagagaaggctccctgttggccaggtgcagtggctcacgcctgtaatgccagcactttgagaacgaggaattctcttcttttttttctgcaggataaggaacagaaaatgaaagtggtagagaatctccaggatgactttgatttcaactataaaaccctcaagagtcaaggagactacaaagacgatgacgacaagtaa

SEQ ID NO: 275 - DNA, 288 bp, synthetic construct
  source 1..288: mol_type = other DNA
gaacagaaaatataaagtttctgaggagaattcaaatgaagccaaaacctcaaaaaagatacatgcaggacctgcaggcagtatccccaagagaaggctccctgttggccaggtgcagtggctcacgcctgtaatgccagcactttgagaacgaggaattctcttcttttttttctgcaggataagtcacagaaaatgaaagtggtagagaatctccaggatgactttgatttcaactataaaaccctcaagagtcaaggagactacaaagacgatgacgacaagtaa

SEQ ID NO: 276 - DNA, 288 bp, synthetic construct
  source 1..288: mol_type = other DNA
gaacagaaaatataaagtttctgaggagaattcaaatgaagccaaaacctcaaaaaagatacatgcaggacctgcaggcagtatccccaagagaaggctccctgttggccaggtgcagtggctcacgcctgtaatgccagcactttgagaacgaggaattctcttcttttttttctgcaggataagtcagcaaaaatgaaagtggtagagaatctccaggatgactttgatttcaactataaaaccctcaagagtcaaggagactacaaagacgatgacgacaagtaa

SEQ ID NO: 277 - DNA, 289 bp, synthetic construct
  source 1..289: mol_type = other DNA
gaacagaaaatataaagtttctgaggagaattcaaatgaagccaaaacctcaaaaaagatacatgcaggacctgcaggcagtatccccaagagaaggctccctgttggccaggtgcagtggctcacgcctgtaatgccagcactttgagaacgaggaattctcttcttttttttctgcaggaatctagaacagaaaatgaaagtggtagagaatctccaggatgactttgatttcaactataaaaccctcaagagtcaaggagactacaaagacgatgacgacaagtaa

SEQ ID NO: 278 - DNA, 290 bp, synthetic construct
  source 1..290: mol_type = other DNA
gaacagaaaatataaagtttctgaggagaattcaaatgaagccaaaacctcaaaaaagatacatgcaggacctgcaggcagtatccccaagagaaggctccctgttggccaggtgcagtggctcacgcctgtaatgccagcactttgagaacgaggaattctcttcttttttttctgcaggaagtctagaacagaaaatgaaagtggtagagaatctccaggatgactttgatttcaactataaaaccctcaagagtcaaggagactacaaagacgatgacgacaagtaa

SEQ ID NO: 279 - DNA, 294 bp, synthetic construct
  source 1..294: mol_type = other DNA
gaacagaaaatataaagtttctgaggagaattcaaatgaagccaaaacctcaaaaaagatacatgcaggacctgcaggcagtatccccaagagaaggctccctgttggccaggtgcagtggctcacgcctgtaatgccagcactttgagaacgaggaattctcttcttttttttctgcaggatttgcacctagaacagaaaatgaaagtggtagagaatctccaggatgactttgatttcaactataaaaccctcaagagtcaaggagactacaaagacgatgacgacaagtaa

SEQ ID NO: 280 - DNA, 300 bp, synthetic construct
  source 1..300: mol_type = other DNA
gaacagaaaatataaagtttctgaggagaattcaaatgaagccaaaacctcaaaaaagatacatgcaggacctgcaggcagtatccccaagagaaggctccctgttggccaggtgcagtggctcacgcctgtaatgccagcactttgagaacgaggaattctcttcttttttttctgcaggatttgcacattgcgctagaacagaaaatgaaagtggtagagaatctccaggatgactttgatttcaactataaaaccctcaagagtcaaggagactacaaagacgatgacgacaagtaa

SEQ ID NO: 281 - DNA, 312 bp, synthetic construct
  source 1..312: mol_type = other DNA
gaacagaaaatataaagtttctgaggagaattcaaatgaagccaaaacctcaaaaaagatacatgcaggacctgcaggcagtatccccaagagaaggctccctgttggccaggtgcagtggctcacgcctgtaatgccagcactttgagaacgaggaattctcttcttttttttctgcaggatttgcacattgcgtcaactcataagctagaacagaaaatgaaagtggtagagaatctccaggatgactttgatttcaactataaaaccctcaagagtcaaggagactacaaagacgatgacgacaagtaa

SEQ ID NO: 282 - DNA, 336 bp, synthetic construct
  source 1..336: mol_type = other DNA
gaacagaaaatataaagtttctgaggagaattcaaatgaagccaaaacctcaaaaaagatacatgcaggacctgcaggcagtatccccaagagaaggctccctgttggccaggtgcagtggctcacgcctgtaatgccagcactttgagaacgaggaattctcttcttttttttctgcaggatttgcacattgcgtcaactcataagatgtctcaacggcatgcgcaacttctagaacagaaaatgaaagtggtagagaatctccaggatgactttgatttcaactataaaaccctcaagagtcaaggagactacaaagacgatgacgacaagtaa

SEQ ID NO: 283 - DNA, 384 bp, synthetic construct
  source 1..384: mol_type = other DNA
gaacagaaaatataaagtttctgaggagaattcaaatgaagccaaaacctcaaaaaagatacatgcaggacctgcaggcagtatccccaagagaaggctccctgttggccaggtgcagtggctcacgcctgtaatgccagcactttgagaacgaggaattctcttcttttttttctgcaggatttgcacattgcgtcaactcataagatgtctcaacggcatgcgcaacttgtgaagtgtctactatccttaaacgcatatctcgcacagtatctcccgctagaacagaaaatgaaagtggtagagaatctccaggatgactttgatttcaactataaaaccctcaagagtcaaggagactacaaagacgatgacgacaagtaa

SEQ ID NO: 284 - DNA, 276 bp, synthetic construct
  source 1..276: mol_type = other DNA
gaacagaaaatataaagtttctgaggagaattcaaatgaagccaaaacctcaaaaaagatacatgcaggacctgcaggcagtatccccaagagaaggctccctgttggccaggtgcagtggctcacgcctgtaatgccagcactttgagaacgaggaattctcttcttttttttctgcagaaaatgaaagtggtagagaatctccaggatgactttgatttcaactataaaaccctcaagagtcaaggagactacaaagacgatgacgacaagtaa

SEQ ID NO: 285 - DNA, 288 bp, synthetic construct
  source 1..288: mol_type = other DNA
gaacagaaaatataaagtttctgaggagaattcaaatgaagccaaaacctcaaaaaagatacatgcaggacctgcaggcagtatccccaagagaaggctccctgttggccaggtgcagtggctcacgcctgtaatgccagcactttgagaacgaggaattctcttcttttttttctgcaggatctaaaacagaaaatgaaagtggtagagaatctccaggatgactttgatttcaactataaaaccctcaagagtcaaggagactacaaagacgatgacgacaagtaa

SEQ ID NO: 286 - DNA, 288 bp, synthetic construct
  source 1..288: mol_type = other DNA
gaacagaaaatataaagtttctgaggagaattcaaatgaagccaaaacctcaaaaaagatacatgcaggacctgcaggcagtatccccaagagaaggctccctgttggccaggtgcagtggctcacgcctgtaatgccagcactttgagaacgaggaattctcttcttttttttctgcaggatctataacagaaaatgaaagtggtagagaatctccaggatgactttgatttcaactataaaaccctcaagagtcaaggagactacaaagacgatgacgacaagtaa

SEQ ID NO: 287 - DNA, 288 bp, synthetic construct
  source 1..288: mol_type = other DNA
gaacagaaaatataaagtttctgaggagaattcaaatgaagccaaaacctcaaaaaagatacatgcaggacctgcaggcagtatccccaagagaaggctccctgttggccaggtgcagtggctcacgcctgtaatgccagcactttgagaacgaggaattctcttcttttttttctgcaggatctacaacagaaaatgaaagtggtagagaatctccaggatgactttgatttcaactataaaaccctcaagagtcaaggagactacaaagacgatgacgacaagtaa

SEQ ID NO: 288 - DNA, 328 bp, synthetic construct
  source 1..328: mol_type = other DNA
atgtggcttctcagggacattgcgttcagctgcactctgtatacctcaggggtgggaccagcacgtcactgagtgaaggaggggagggaggctctggcagttgtgcagccttcctggctgggctctgagggggctggaagaatttagaacaacgaggaattctcttcttttttttctgcagaaggtggtgcggaaggtggagagcaccaagacagacagccgggataaacccctgaaggatgtgatcatcgcagactgcggcaagatcgaggtggagaagccctttgccatcgccaaggaggactacaaagacgatgacgacaagtaa

SEQ ID NO: 289 - DNA, 328 bp, synthetic construct
  source 1..328: mol_type = other DNA
atgtggcttctcagggacattgcgttcagctgcactctgtatacctcaggggtgggaccagcacgtcactgagtgaaggaggggagggaggctctggcagttgtgcagccttcctggctgggctctgagggggctggaagaatttagaacaacgaggaattctcttcttttttttctgcagtaggtggtgcggaaggtggagagcaccaagacagacagccgggataaacccctgaaggatgtgatcatcgcagactgcggcaagatcgaggtggagaagccctttgccatcgccaaggaggactacaaagacgatgacgacaagtaa

SEQ ID NO: 290 - DNA, 328 bp, synthetic construct
  source 1..328: mol_type = other DNA
atgtggcttctcagggacattgcgttcagctgcactctgtatacctcaggggtgggaccagcacgtcactgagtgaaggaggggagggaggctctggcagttgtgcagccttcctggctgggctctgagggggctggaagaatttagaacaacgaggaattctcttcttttttttctgcagcaggtggtgcggaaggtggagagcaccaagacagacagccgggataaacccctgaaggatgtgatcatcgcagactgcggcaagatcgaggtggagaagccctttgccatcgccaaggaggactacaaagacgatgacgacaagtaa

SEQ ID NO: 291 - DNA, 328 bp, synthetic construct
  source 1..328: mol_type = other DNA
atgtggcttctcagggacattgcgttcagctgcactctgtatacctcaggggtgggaccagcacgtcactgagtgaaggaggggagggaggctctggcagttgtgcagccttcctggctgggctctgagggggctggaagaatttagaacaacgaggaattctcttcttttttttctgcaggtggtggtgcggaaggtggagagcaccaagacagacagccgggataaacccctgaaggatgtgatcatcgcagactgcggcaagatcgaggtggagaagccctttgccatcgccaaggaggactacaaagacgatgacgacaagtaa

SEQ ID NO: 292 - DNA, 328 bp, synthetic construct
  source 1..328: mol_type = other DNA
atgtggcttctcagggacattgcgttcagctgcactctgtatacctcaggggtgggaccagcacgtcactgagtgaaggaggggagggaggctctggcagttgtgcagccttcctggctgggctctgagggggctggaagaatttagaacaacgaggaattctcttcttttttttctgcaggcggtggtgcggaaggtggagagcaccaagacagacagccgggataaacccctgaaggatgtgatcatcgcagactgcggcaagatcgaggtggagaagccctttgccatcgccaaggaggactacaaagacgatgacgacaagtaa

SEQ ID NO: 293 - DNA, 328 bp, synthetic construct
  source 1..328: mol_type = other DNA
atgtggcttctcagggacattgcgttcagctgcactctgtatacctcaggggtgggaccagcacgtcactgagtgaaggaggggagggaggctctggcagttgtgcagccttcctggctgggctctgagggggctggaagaatttagaacaacgaggaattctcttcttttttttctgcagggggtggtgcggaaggtggagagcaccaagacagacagccgggataaacccctgaaggatgtgatcatcgcagactgcggcaagatcgaggtggagaagccctttgccatcgccaaggaggactacaaagacgatgacgacaagtaa

SEQ ID NO: 294 - DNA, 328 bp, synthetic construct
  source 1..328: mol_type = other DNA
atgtggcttctcagggacattgcgttcagctgcactctgtatacctcaggggtgggaccagcacgtcactgagtgaaggaggggagggaggctctggcagttgtgcagccttcctggctgggctctgagggggctggaagaatttagaacaacgaggaattctcttcttttttttctgcaggaggaggtgcggaaggtggagagcaccaagacagacagccgggataaacccctgaaggatgtgatcatcgcagactgcggcaagatcgaggtggagaagccctttgccatcgccaaggaggactacaaagacgatgacgacaagtaa

SEQ ID NO: 295 - DNA, 328 bp, synthetic construct
  source 1..328: mol_type = other DNA
atgtggcttctcagggacattgcgttcagctgcactctgtatacctcaggggtgggaccagcacgtcactgagtgaaggaggggagggaggctctggcagttgtgcagccttcctggctgggctctgagggggctggaagaatttagaacaacgaggaattctcttcttttttttctgcaggaggcggtgcggaaggtggagagcaccaagacagacagccgggataaacccctgaaggatgtgatcatcgcagactgcggcaagatcgaggtggagaagccctttgccatcgccaaggaggactacaaagacgatgacgacaagtaa

SEQ ID NO: 296 - DNA, 328 bp, synthetic construct
  source 1..328: mol_type = other DNA
atgtggcttctcagggacattgcgttcagctgcactctgtatacctcaggggtgggaccagcacgtcactgagtgaaggaggggagggaggctctggcagttgtgcagccttcctggctgggctctgagggggctggaagaatttagaacaacgaggaattctcttcttttttttctgcaggagggggtgcggaaggtggagagcaccaagacagacagccgggataaacccctgaaggatgtgatcatcgcagactgcggcaagatcgaggtggagaagccctttgccatcgccaaggaggactacaaagacgatgacgacaagtaa

SEQ ID NO: 297 - DNA, 328 bp, synthetic construct
  source 1..328: mol_type = other DNA
atgtggcttctcagggacattgcgttcagctgcactctgtatacctcaggggtgggaccagcacgtcactgagtgaaggaggggagggaggctctggcagttgtgcagccttcctggctgggctctgagggggctggaagaatttagaacaacgaggaattctcttcttttttttctgcaggaggtggtgtggaaggtggagagcaccaagacagacagccgggataaacccctgaaggatgtgatcatcgcagactgcggcaagatcgaggtggagaagccctttgccatcgccaaggaggactacaaagacgatgacgacaagtaa

SEQ ID NO: 298 - DNA, 328 bp, synthetic construct
  source 1..328: mol_type = other DNA
atgtggcttctcagggacattgcgttcagctgcactctgtatacctcaggggtgggaccagcacgtcactgagtgaaggaggggagggaggctctggcagttgtgcagccttcctggctgggctctgagggggctggaagaatttagaacaacgaggaattctcttcttttttttctgcaggaggtggtggggaaggtggagagcaccaagacagacagccgggataaacccctgaaggatgtgatcatcgcagactgcggcaagatcgaggtggagaagccctttgccatcgccaaggaggactacaaagacgatgacgacaagtaa

SEQ ID NO: 299 - DNA, 328 bp, synthetic construct
  source 1..328: mol_type = other DNA
atgtggcttctcagggacattgcgttcagctgcactctgtatacctcaggggtgggaccagcacgtcactgagtgaaggaggggagggaggctctggcagttgtgcagccttcctggctgggctctgagggggctggaagaatttagaacaacgaggaattctcttcttttttttctgcaggaggtggtgaggaaggtggagagcaccaagacagacagccgggataaacccctgaaggatgtgatcatcgcagactgcggcaagatcgaggtggagaagccctttgccatcgccaaggaggactacaaagacgatgacgacaagtaa

SEQ ID NO: 300 - DNA, 328 bp, synthetic construct
  source 1..328: mol_type = other DNA
atgtggcttctcagggacattgcgttcagctgcactctgtatacctcaggggtgggaccagcacgtcactgagtgaaggaggggagggaggctctggcagttgtgcagccttcctggctgggctctgagggggctggaagaatttagaacaacgaggaattctcttcttttttttctgcaggaagtggtgcggaaggtggagagcaccaagacagacagccgggataaacccctgaaggatgtgatcatcgcagactgcggcaagatcgaggtggagaagccctttgccatcgccaaggaggactacaaagacgatgacgacaagtaa

SEQ ID NO: 301 - DNA, 328 bp, synthetic construct
  source 1..328: mol_type = other DNA
atgtggcttctcagggacattgcgttcagctgcactctgtatacctcaggggtgggaccagcacgtcactgagtgaaggaggggagggaggctctggcagttgtgcagccttcctggctgggctctgagggggctggaagaatttagaacaacgaggaattctcttcttttttttctgcaggatgtggtgcggaaggtggagagcaccaagacagacagccgggataaacccctgaaggatgtgatcatcgcagactgcggcaagatcgaggtggagaagccctttgccatcgccaaggaggactacaaagacgatgacgacaagtaa

SEQ ID NO: 302 - DNA, 328 bp, synthetic construct
  source 1..328: mol_type = other DNA
atgtggcttctcagggacattgcgttcagctgcactctgtatacctcaggggtgggaccagcacgtcactgagtgaaggaggggagggaggctctggcagttgtgcagccttcctggctgggctctgagggggctggaagaatttagaacaacgaggaattctcttcttttttttctgcaggacgtggtgcggaaggtggagagcaccaagacagacagccgggataaacccctgaaggatgtgatcatcgcagactgcggcaagatcgaggtggagaagccctttgccatcgccaaggaggactacaaagacgatgacgacaagtaa

SEQ ID NO: 303 - DNA, 328 bp, synthetic construct
  source 1..328: mol_type = other DNA
atgtggcttctcagggacattgcgttcagctgcactctgtatacctcaggggtgggaccagcacgtcactgagtgaaggaggggagggaggctctggcagttgtgcagccttcctggctgggctctgagggggctggaagaatttagaacaacgaggaattctcttcttttttttctgcaggcagtggtgcggaaggtggagagcaccaagacagacagccgggataaacccctgaaggatgtgatcatcgcagactgcggcaagatcgaggtggagaagccctttgccatcgccaaggaggactacaaagacgatgacgacaagtaa

SEQ ID NO: 304 - DNA, 328 bp, synthetic construct
  source 1..328: mol_type = other DNA
atgtggcttctcagggacattgcgttcagctgcactctgtatacctcaggggtgggaccagcacgtcactgagtgaaggaggggagggaggctctggcagttgtgcagccttcctggctgggctctgagggggctggaagaatttagaacaacgaggaattctcttcttttttttctgcaggcaccggtgcggaaggtggagagcaccaagacagacagccgggataaacccctgaaggatgtgatcatcgcagactgcggcaagatcgaggtggagaagccctttgccatcgccaaggaggactacaaagacgatgacgacaagtaa

SEQ ID NO: 305 - DNA, 328 bp, synthetic construct
  source 1..328: mol_type = other DNA
atgtggcttctcagggacattgcgttcagctgcactctgtatacctcaggggtgggaccagcacgtcactgagtgaaggaggggagggaggctctggcagttgtgcagccttcctggctgggctctgagggggctggaagaatttagaacaacgaggaattctcttcttttttttctgcaggcaccgacccggaaggtggagagcaccaagacagacagccgggataaacccctgaaggatgtgatcatcgcagactgcggcaagatcgaggtggagaagccctttgccatcgccaaggaggactacaaagacgatgacgacaagtaa

SEQ ID NO: 306 - DNA, 329 bp, synthetic construct
  source 1..329: mol_type = other DNA
atgtggcttctcagggacattgcgttcagctgcactctgtatacctcaggggtgggaccagcacgtcactgagtgaaggaggggagggaggctctggcagttgtgcagccttcctggctgggctctgagggggctggaagaatttagaacaacgaggaattctcttcttttttttctgcaggagagtggtgcggaaggtggagagcaccaagacagacagccgggataaacccctgaaggatgtgatcatcgcagactgcggcaagatcgaggtggagaagccctttgccatcgccaaggaggactacaaagacgatgacgacaagtaa

SEQ ID NO: 307 - DNA, 330 bp, synthetic construct
  source 1..330: mol_type = other DNA
atgtggcttctcagggacattgcgttcagctgcactctgtatacctcaggggtgggaccagcacgtcactgagtgaaggaggggagggaggctctggcagttgtgcagccttcctggctgggctctgagggggctggaagaatttagaacaacgaggaattctcttcttttttttctgcaggagaggtggtgcggaaggtggagagcaccaagacagacagccgggataaacccctgaaggatgtgatcatcgcagactgcggcaagatcgaggtggagaagccctttgccatcgccaaggaggactacaaagacgatgacgacaagtaa

SEQ ID NO: 308 - DNA, 334 bp, synthetic construct
  source 1..334: mol_type = other DNA
atgtggcttctcagggacattgcgttcagctgcactctgtatacctcaggggtgggaccagcacgtcactgagtgaaggaggggagggaggctctggcagttgtgcagccttcctggctgggctctgagggggctggaagaatttagaacaacgaggaattctcttcttttttttctgcaggagttgcacgtggtgcggaaggtggagagcaccaagacagacagccgggataaacccctgaaggatgtgatcatcgcagactgcggcaagatcgaggtggagaagccctttgccatcgccaaggaggactacaaagacgatgacgacaagtaa

SEQ ID NO: 309 - DNA, 340 bp, synthetic construct
  source 1..340: mol_type = other DNA
atgtggcttctcagggacattgcgttcagctgcactctgtatacctcaggggtgggaccagcacgtcactgagtgaaggaggggagggaggctctggcagttgtgcagccttcctggctgggctctgagggggctggaagaatttagaacaacgaggaattctcttcttttttttctgcaggagttgcacattgcggtggtgcggaaggtggagagcaccaagacagacagccgggataaacccctgaaggatgtgatcatcgcagactgcggcaagatcgaggtggagaagccctttgccatcgccaaggaggactacaaagacgatgacgacaagtaa

SEQ ID NO: 310 - DNA, 352 bp, synthetic construct
  source 1..352: mol_type = other DNA
atgtggcttctcagggacattgcgttcagctgcactctgtatacctcaggggtgggaccagcacgtcactgagtgaaggaggggagggaggctctggcagttgtgcagccttcctggctgggctctgagggggctggaagaatttagaacaacgaggaattctcttcttttttttctgcaggagttgcacattgcgtcaactcataaggtggtgcggaaggtggagagcaccaagacagacagccgggataaacccctgaaggatgtgatcatcgcagactgcggcaagatcgaggtggagaagccctttgccatcgccaaggaggactacaaagacgatgacgacaagtaa

SEQ ID NO: 311 - DNA, 376 bp, synthetic construct
  source 1..376: mol_type = other DNA
atgtggcttctcagggacattgcgttcagctgcactctgtatacctcaggggtgggaccagcacgtcactgagtgaaggaggggagggaggctctggcagttgtgcagccttcctggctgggctctgagggggctggaagaatttagaacaacgaggaattctcttcttttttttctgcaggagttgcacattgcgtcaactcataagatgtctcaacggcatgcgcaacttgtggtgcggaaggtggagagcaccaagacagacagccgggataaacccctgaaggatgtgatcatcgcagactgcggcaagatcgaggtggagaagccctttgccatcgccaaggaggactacaaagacgatgacgacaagtaa

SEQ ID NO: 312 - DNA, 424 bp, synthetic construct
  source 1..424: mol_type = other DNA
atgtggcttctcagggacattgcgttcagctgcactctgtatacctcaggggtgggaccagcacgtcactgagtgaaggaggggagggaggctctggcagttgtgcagccttcctggctgggctctgagggggctggaagaatttagaacaacgaggaattctcttcttttttttctgcaggagttgcacattgcgtcaactcataagatgtctcaacggcatgcgcaacttgtgaagtgtctactatccttaaacgcatatctcgcacagtatctcccggtggtgcggaaggtggagagcaccaagacagacagccgggataaacccctgaaggatgtgatcatcgcagactgcggcaagatcgaggtggagaagccctttgccatcgccaaggaggactacaaagacgatgacgacaagtaa

SEQ ID NO: 313 - DNA, 322 bp, synthetic construct
  source 1..322: mol_type = other DNA
atgtggcttctcagggacattgcgttcagctgcactctgtatacctcaggggtgggaccagcacgtcactgagtgaaggaggggagggaggctctggcagttgtgcagccttcctggctgggctctgagggggctggaagaatttagaacaacgaggaattctcttcttttttttctgcaggagcggaaggtggagagcaccaagacagacagccgggataaacccctgaaggatgtgatcatcgcagactgcggcaagatcgaggtggagaagccctttgccatcgccaaggaggactacaaagacgatgacgacaagtaa

SEQ ID NO: 314 - DNA, 316 bp, synthetic construct
  source 1..316: mol_type = other DNA
atgtggcttctcagggacattgcgttcagctgcactctgtatacctcaggggtgggaccagcacgtcactgagtgaaggaggggagggaggctctggcagttgtgcagccttcctggctgggctctgagggggctggaagaatttagaacaacgaggaattctcttcttttttttctgcaggaggtggagagcaccaagacagacagccgggataaacccctgaaggatgtgatcatcgcagactgcggcaagatcgaggtggagaagccctttgccatcgccaaggaggactacaaagacgatgacgacaagtaa

SEQ ID NO: 315 - DNA, 304 bp, synthetic construct
  source 1..304: mol_type = other DNA
atgtggcttctcagggacattgcgttcagctgcactctgtatacctcaggggtgggaccagcacgtcactgagtgaaggaggggagggaggctctggcagttgtgcagccttcctggctgggctctgagggggctggaagaatttagaacaacgaggaattctcttcttttttttctgcaggagaagacagacagccgggataaacccctgaaggatgtgatcatcgcagactgcggcaagatcgaggtggagaagccctttgccatcgccaaggaggactacaaagacgatgacgacaagtaa

SEQ ID NO: 316 - DNA, 289 bp, synthetic construct
  source 1..289: mol_type = other DNA
ggaacagaaaatataaagtttctgaggagaattcaaatgaagccaaaacctcaaaaaagatacatgcaggacctgcaggcagtatccccaagagaaggctccctgttggccaggtgcagtggctcacgcctgtaatgccagcactttgagaacgactaactctcttcttttttttctgcaggacctcgagcagaaaatgaaagtggtagagaatctccaggatgactttgatttcaactataaaaccctcaagagtcaaggagactacaaagacgatgacgacaagtaa

SEQ ID NO: 317 - DNA, 289 bp, synthetic construct
  source 1..289: mol_type = other DNA
ggaacagaaaatataaagtttctgaggagaattcaaatgaagccaaaacctcaaaaaagatacatgcaggacctgcaggcagtatccccaagagaaggctccctgttggccaggtgcagtggctcacgcctgtaatgccagcactttgagaacgattaactctcttcttttttttctgcaggacctcgagcagaaaatgaaagtggtagagaatctccaggatgactttgatttcaactataaaaccctcaagagtcaaggagactacaaagacgatgacgacaagtaa

SEQ ID NO: 318 - DNA, 289 bp, synthetic construct
  source 1..289: mol_type = other DNA
ggaacagaaaatataaagtttctgaggagaattcaaatgaagccaaaacctcaaaaaagatacatgcaggacctgcaggcagtatccccaagagaaggctccctgttggccaggtgcagtggctcacgcctgtaatgccagcactttgagaacgattaattctcttcttttttttctgcaggacctcgagcagaaaatgaaagtggtagagaatctccaggatgactttgatttcaactataaaaccctcaagagtcaaggagactacaaagacgatgacgacaagtaa

SEQ ID NO: 319 - DNA, 289 bp, synthetic construct
  source 1..289: mol_type = other DNA
ggaacagaaaatataaagtttctgaggagaattcaaatgaagccaaaacctcaaaaaagatacatgcaggacctgcaggcagtatccccaagagaaggctccctgttggccaggtgcagtggctcacgcctgtaatgccagcactttgagaacgactaattctcttcttttttttctgcaggacctcgagcagaaaatgaaagtggtagagaatctccaggatgactttgatttcaactataaaaccctcaagagtcaaggagactacaaagacgatgacgacaagtaa

SEQ ID NO: 320 - DNA, 289 bp, synthetic construct
  source 1..289: mol_type = other DNA
ggaacagaaaatataaagtttctgaggagaattcaaatgaagccaaaacctcaaaaaagatacatgcaggacctgcaggcagtatccccaagagaaggctccctgttggccaggtgcagtggctcacgcctgtaatgccagcactttgagaacgactgactctcttcttttttttctgcaggacctcgagcagaaaatgaaagtggtagagaatctccaggatgactttgatttcaactataaaaccctcaagagtcaaggagactacaaagacgatgacgacaagtaa

SEQ ID NO: 321 - DNA, 289 bp, synthetic construct
  source 1..289: mol_type = other DNA
ggaacagaaaatataaagtttctgaggagaattcaaatgaagccaaaacctcaaaaaagatacatgcaggacctgcaggcagtatccccaagagaaggctccctgttggccaggtgcagtggctcacgcctgtaatgccagcactttgagaacgattgactctcttcttttttttctgcaggacctcgagcagaaaatgaaagtggtagagaatctccaggatgactttgatttcaactataaaaccctcaagagtcaaggagactacaaagacgatgacgacaagtaa

SEQ ID NO: 322 - DNA, 289 bp, synthetic construct
  source 1..289: mol_type = other DNA
ggaacagaaaatataaagtttctgaggagaattcaaatgaagccaaaacctcaaaaaagatacatgcaggacctgcaggcagtatccccaagagaaggctccctgttggccaggtgcagtggctcacgcctgtaatgccagcactttgagaacgattgattctcttcttttttttctgcaggacctcgagcagaaaatgaaagtggtagagaatctccaggatgactttgatttcaactataaaaccctcaagagtcaaggagactacaaagacgatgacgacaagtaa

SEQ ID NO: 323 - DNA, 289 bp, synthetic construct
  source 1..289: mol_type = other DNA
ggaacagaaaatataaagtttctgaggagaattcaaatgaagccaaaacctcaaaaaagatacatgcaggacctgcaggcagtatccccaagagaaggctccctgttggccaggtgcagtggctcacgcctgtaatgccagcactttgagaacgactgattctcttcttttttttctgcaggacctcgagcagaaaatgaaagtggtagagaatctccaggatgactttgatttcaactataaaaccctcaagagtcaaggagactacaaagacgatgacgacaagtaa

SEQ ID NO: 324 - DNA, 289 bp, synthetic construct
  source 1..289: mol_type = other DNA
ggaacagaaaatataaagtttctgaggagaattcaaatgaagccaaaacctcaaaaaagatacatgcaggacctgcaggcagtatccccaagagaaggctccctgttggccaggtgcagtggctcacgcctgtaatgccagcactttgagaacgactcactctcttcttttttttctgcaggacctcgagcagaaaatgaaagtggtagagaatctccaggatgactttgatttcaactataaaaccctcaagagtcaaggagactacaaagacgatgacgacaagtaa

SEQ ID NO: 325 - DNA, 289 bp, synthetic construct
  source 1..289: mol_type = other DNA
ggaacagaaaatataaagtttctgaggagaattcaaatgaagccaaaacctcaaaaaagatacatgcaggacctgcaggcagtatccccaagagaaggctccctgttggccaggtgcagtggctcacgcctgtaatgccagcactttgagaacgattcactctcttcttttttttctgcaggacctcgagcagaaaatgaaagtggtagagaatctccaggatgactttgatttcaactataaaaccctcaagagtcaaggagactacaaagacgatgacgacaagtaa

SEQ ID NO: 326 - DNA, 289 bp, synthetic construct
  source 1..289: mol_type = other DNA
ggaacagaaaatataaagtttctgaggagaattcaaatgaagccaaaacctcaaaaaagatacatgcaggacctgcaggcagtatccccaagagaaggctccctgttggccaggtgcagtggctcacgcctgtaatgccagcactttgagaacgattcattctcttcttttttttctgcaggacctcgagcagaaaatgaaagtggtagagaatctccaggatgactttgatttcaactataaaaccctcaagagtcaaggagactacaaagacgatgacgacaagtaa

SEQ ID NO: 327 - DNA, 289 bp, synthetic construct
  source 1..289: mol_type = other DNA
ggaacagaaaatataaagtttctgaggagaattcaaatgaagccaaaacctcaaaaaagatacatgcaggacctgcaggcagtatccccaagagaaggctccctgttggccaggtgcagtggctcacgcctgtaatgccagcactttgagaacgacttactctcttcttttttttctgcaggacctcgagcagaaaatgaaagtggtagagaatctccaggatgactttgatttcaactataaaaccctcaagagtcaaggagactacaaagacgatgacgacaagtaa

SEQ ID NO: 328 - DNA, 289 bp, synthetic construct
  source 1..289: mol_type = other DNA
ggaacagaaaatataaagtttctgaggagaattcaaatgaagccaaaacctcaaaaaagatacatgcaggacctgcaggcagtatccccaagagaaggctccctgttggccaggtgcagtggctcacgcctgtaatgccagcactttgagaacgatttactctcttcttttttttctgcaggacctcgagcagaaaatgaaagtggtagagaatctccaggatgactttgatttcaactataaaaccctcaagagtcaaggagactacaaagacgatgacgacaagtaa

SEQ ID NO: 329 - DNA, 289 bp, synthetic construct
  source 1..289: mol_type = other DNA
ggaacagaaaatataaagtttctgaggagaattcaaatgaagccaaaacctcaaaaaagatacatgcaggacctgcaggcagtatccccaagagaaggctccctgttggccaggtgcagtggctcacgcctgtaatgccagcactttgagaacgatttattctcttcttttttttctgcaggacctcgagcagaaaatgaaagtggtagagaatctccaggatgactttgatttcaactataaaaccctcaagagtcaaggagactacaaagacgatgacgacaagtaa

SEQ ID NO: 330 - DNA, 289 bp, synthetic construct
  source 1..289: mol_type = other DNA
ggaacagaaaatataaagtttctgaggagaattcaaatgaagccaaaacctcaaaaaagatacatgcaggacctgcaggcagtatccccaagagaaggctccctgttggccaggtgcagtggctcacgcctgtaatgccagcactttgagaacgacttattctcttcttttttttctgcaggacctcgagcagaaaatgaaagtggtagagaatctccaggatgactttgatttcaactataaaaccctcaagagtcaaggagactacaaagacgatgacgacaagtaa

SEQ ID NO: 331 - DNA, 328 bp, synthetic construct
  source 1..328: mol_type = other DNA
atgtggcttctcagggacattgcgttcagctgcactctgtatacctcaggggtgggaccagcacgtcactgagtgaaggaggggagggaggctctggcagttgtgcagccttcctggctgggctctgagggggctggaagaatttagaacaacgactaactctcttcttttttttctgcaggaagttgttcggaaggtggagagcaccaagacagacagccgggataaacccctgaaggatgtgatcatcgcagactgcggcaagatcgaggtggagaagccctttgccatcgccaaggaggactacaaagacgatgacgacaagtaa

SEQ ID NO: 332 - DNA, 328 bp, synthetic construct
  source 1..328: mol_type = other DNA
atgtggcttctcagggacattgcgttcagctgcactctgtatacctcaggggtgggaccagcacgtcactgagtgaaggaggggagggaggctctggcagttgtgcagccttcctggctgggctctgagggggctggaagaatttagaacaacgattaactctcttcttttttttctgcaggaagttgttcggaaggtggagagcaccaagacagacagccgggataaacccctgaaggatgtgatcatcgcagactgcggcaagatcgaggtggagaagccctttgccatcgccaaggaggactacaaagacgatgacgacaagtaa

SEQ ID NO: 333 - DNA, 328 bp, synthetic construct
  source 1..328: mol_type = other DNA
atgtggcttctcagggacattgcgttcagctgcactctgtatacctcaggggtgggaccagcacgtcactgagtgaaggaggggagggaggctctggcagttgtgcagccttcctggctgggctctgagggggctggaagaatttagaacaacgattaattctcttcttttttttctgcaggaagttgttcggaaggtggagagcaccaagacagacagccgggataaacccctgaaggatgtgatcatcgcagactgcggcaagatcgaggtggagaagccctttgccatcgccaaggaggactacaaagacgatgacgacaagtaa

SEQ ID NO: 334 - DNA, 328 bp, synthetic construct
  source 1..328: mol_type = other DNA
atgtggcttctcagggacattgcgttcagctgcactctgtatacctcaggggtgggaccagcacgtcactgagtgaaggaggggagggaggctctggcagttgtgcagccttcctggctgggctctgagggggctggaagaatttagaacaacgactaattctcttcttttttttctgcaggaagttgttcggaaggtggagagcaccaagacagacagccgggataaacccctgaaggatgtgatcatcgcagactgcggcaagatcgaggtggagaagccctttgccatcgccaaggaggactacaaagacgatgacgacaagtaa

SEQ ID NO: 335 - DNA, 328 bp, synthetic construct
  source 1..328: mol_type = other DNA
atgtggcttctcagggacattgcgttcagctgcactctgtatacctcaggggtgggaccagcacgtcactgagtgaaggaggggagggaggctctggcagttgtgcagccttcctggctgggctctgagggggctggaagaatttagaacaacgactgactctcttcttttttttctgcaggaagttgttcggaaggtggagagcaccaagacagacagccgggataaacccctgaaggatgtgatcatcgcagactgcggcaagatcgaggtggagaagccctttgccatcgccaaggaggactacaaagacgatgacgacaagtaa

SEQ ID NO: 336 - DNA, 328 bp, synthetic construct
  source 1..328: mol_type = other DNA
atgtggcttctcagggacattgcgttcagctgcactctgtatacctcaggggtgggaccagcacgtcactgagtgaaggaggggagggaggctctggcagttgtgcagccttcctggctgggctctgagggggctggaagaatttagaacaacgattgactctcttcttttttttctgcaggaagttgttcggaaggtggagagcaccaagacagacagccgggataaacccctgaaggatgtgatcatcgcagactgcggcaagatcgaggtggagaagccctttgccatcgccaaggaggactacaaagacgatgacgacaagtaa

SEQ ID NO: 337 - DNA, 328 bp, synthetic construct
  source 1..328: mol_type = other DNA
atgtggcttctcagggacattgcgttcagctgcactctgtatacctcaggggtgggaccagcacgtcactgagtgaaggaggggagggaggctctggcagttgtgcagccttcctggctgggctctgagggggctggaagaatttagaacaacgattgattctcttcttttttttctgcaggaagttgttcggaaggtggagagcaccaagacagacagccgggataaacccctgaaggatgtgatcatcgcagactgcggcaagatcgaggtggagaagccctttgccatcgccaaggaggactacaaagacgatgacgacaagtaa

SEQ ID NO: 338 - DNA, 328 bp, synthetic construct
  source 1..328: mol_type = other DNA
atgtggcttctcagggacattgcgttcagctgcactctgtatacctcaggggtgggaccagcacgtcactgagtgaaggaggggagggaggctctggcagttgtgcagccttcctggctgggctctgagggggctggaagaatttagaacaacgactgattctcttcttttttttctgcaggaagttgttcggaaggtggagagcaccaagacagacagccgggataaacccctgaaggatgtgatcatcgcagactgcggcaagatcgaggtggagaagccctttgccatcgccaaggaggactacaaagacgatgacgacaagtaa

SEQ ID NO: 339 - DNA, 328 bp, synthetic construct
  source 1..328: mol_type = other DNA
atgtggcttctcagggacattgcgttcagctgcactctgtatacctcaggggtgggaccagcacgtcactgagtgaaggaggggagggaggctctggcagttgtgcagccttcctggctgggctctgagggggctggaagaatttagaacaacgactcactctcttcttttttttctgcaggaagttgttcggaaggtggagagcaccaagacagacagccgggataaacccctgaaggatgtgatcatcgcagactgcggcaagatcgaggtggagaagccctttgccatcgccaaggaggactacaaagacgatgacgacaagtaa

SEQ ID NO: 340 - DNA, 328 bp, synthetic construct
  source 1..328: mol_type = other DNA
atgtggcttctcagggacattgcgttcagctgcactctgtatacctcaggggtgggaccagcacgtcactgagtgaaggaggggagggaggctctggcagttgtgcagccttcctggctgggctctgagggggctggaagaatttagaacaacgattcactctcttcttttttttctgcaggaagttgttcggaaggtggagagcaccaagacagacagccgggataaacccctgaaggatgtgatcatcgcagactgcggcaagatcgaggtggagaagccctttgccatcgccaaggaggactacaaagacgatgacgacaagtaa

SEQ ID NO: 341 - DNA, 328 bp, synthetic construct
  source 1..328: mol_type = other DNA
atgtggcttctcagggacattgcgttcagctgcactctgtatacctcaggggtgggaccagcacgtcactgagtgaaggaggggagggaggctctggcagttgtgcagccttcctggctgggctctgagggggctggaagaatttagaacaacgattcattctcttcttttttttctgcaggaagttgttcggaaggtggagagcaccaagacagacagccgggataaacccctgaaggatgtgatcatcgcagactgcggcaagatcgaggtggagaagccctttgccatcgccaaggaggactacaaagacgatgacgacaagtaa

SEQ ID NO: 342 - DNA, 328 bp, synthetic construct
  source 1..328: mol_type = other DNA
atgtggcttctcagggacattgcgttcagctgcactctgtatacctcaggggtgggaccagcacgtcactgagtgaaggaggggagggaggctctggcagttgtgcagccttcctggctgggctctgagggggctggaagaatttagaacaacgacttactctcttcttttttttctgcaggaagttgttcggaaggtggagagcaccaagacagacagccgggataaacccctgaaggatgtgatcatcgcagactgcggcaagatcgaggtggagaagccctttgccatcgccaaggaggactacaaagacgatgacgacaagtaa

SEQ ID NO: 343 - DNA, 328 bp, synthetic construct
  source 1..328: mol_type = other DNA
atgtggcttctcagggacattgcgttcagctgcactctgtatacctcaggggtgggaccagcacgtcactgagtgaaggaggggagggaggctctggcagttgtgcagccttcctggctgggctctgagggggctggaagaatttagaacaacgatttactctcttcttttttttctgcaggaagttgttcggaaggtggagagcaccaagacagacagccgggataaacccctgaaggatgtgatcatcgcagactgcggcaagatcgaggtggagaagccctttgccatcgccaaggaggactacaaagacgatgacgacaagtaa

SEQ ID NO: 344 - DNA, 328 bp, synthetic construct
  source 1..328: mol_type = other DNA
atgtggcttctcagggacattgcgttcagctgcactctgtatacctcaggggtgggaccagcacgtcactgagtgaaggaggggagggaggctctggcagttgtgcagccttcctggctgggctctgagggggctggaagaatttagaacaacgatttattctcttcttttttttctgcaggaagttgttcggaaggtggagagcaccaagacagacagccgggataaacccctgaaggatgtgatcatcgcagactgcggcaagatcgaggtggagaagccctttgccatcgccaaggaggactacaaagacgatgacgacaagtaa

SEQ ID NO: 345 - DNA, 328 bp, synthetic construct
  source 1..328: mol_type = other DNA
atgtggcttctcagggacattgcgttcagctgcactctgtatacctcaggggtgggaccagcacgtcactgagtgaaggaggggagggaggctctggcagttgtgcagccttcctggctgggctctgagggggctggaagaatttagaacaacgacttattctcttcttttttttctgcaggaagttgttcggaaggtggagagcaccaagacagacagccgggataaacccctgaaggatgtgatcatcgcagactgcggcaagatcgaggtggagaagccctttgccatcgccaaggaggactacaaagacgatgacgacaagtaa

SEQ ID NO: 346 - DNA, 330 bp, synthetic construct
  source 1..330: mol_type = other DNA
agcaagggagggattctatccaaagcttgtgattatatccaggagcttcggcagagtaaccaccgcttgtctgaagaactgcagggacttgaccaactgcagctggacaatgacgtgctccgtcagcaggtaagtttgggctgcatgactgcatggttgcatgaacacatattaatttccgtagtaaagctggcacttccaagcccctgaatgtattcagacatccactggtgagggggaaaagatgaagccttctccatggagaacaaagtagagggtgtcaaactgggtcagtggctagcagaactgagaagggctgcactgggggta

SEQ ID NO: 347 - DNA, 260 bp, synthetic construct
  source 1..260: mol_type = other DNA
agcaagggagggattctatccaaagcttgtgattatatccaggagcttcggcagagtaaccaccgcttgtctgaagaactgcagggacttgaccaactgcagctggacaatgacgtgctccgtcagcaggtaagtttgggctgcatgactgcatggttgcatgaacacatattaatttccccttctccatggagaacaaagtagagggtgtcaaactgggtcagtggctagcagaactgagaagggctgcactgggggta

SEQ ID NO: 348 - DNA, 260 bp, synthetic construct
  source 1..260: mol_type = other DNA
agcaagggagggattctatccaaagcttgtgattatatccaggagcttcggcagagtaaccaccgcttgtctgaagaactgcagggacttgaccaactgcagctggacaatgacgtgctccgtcagcaggtaagtttgggctgcatgactgcatggttgcatgaacacatattaatttccatgtattcagacatccactggtgagggggaaaagatgaagccttctccatggagaacaaagtagagggtgtcaaactggg

SEQ ID NO: 349 - DNA, 260 bp, synthetic construct
  source 1..260: mol_type = other DNA
agcaagggagggattctatccaaagcttgtgattatatccaggagcttcggcagagtaaccaccgcttgtctgaagaactgcagggacttgaccaactgcagctggacaatgacgtgctccgtcagcaggtaagtttgggctgcatgactgcatggttgcatgaacacatattaatttccaagggaatgggtagtaaagctggcacttccaagcccctgaatgtattcagacatccactggtgagggggaaaagatgaag

SEQ ID NO: 350 - DNA, 330 bp, synthetic construct
  source 1..330: mol_type = other DNA
agcaagggagggattctatccaaagcttgtgattatatccaggagcttcggcagagtaaccaccgcttgtctgaagaactgcagggacttgaccaactgcagctggacaatgacgtgctccgtcagcaggtaagtttgggctgcatgactgcatggttgcatgaacacatattaatttccttgaccaagtggagggtgctcttccagctcttgaacaggacctagagagttggatgtattagatgggcgtacgcagtatgtgcccagttgtatgattgtgcgttttcaaggaagggagtgtgcgtcgattcgttcagtatcgacaggggg

SEQ ID NO: 351 - DNA, 225 bp, synthetic construct
  source 1..225: mol_type = other DNA
gccaccatggactacaaagacgatgacgacaagggcccggctgtggctgaggagcccctccaccgaccgttgaattgggctgcatgactgcatggttgcatgaacacatattaatttcctccacttagttctacacctcattcattcattcagtgagtgtttctcgactactatgaataaaccgttatactccatgttgcgggcagaatggggatctggacaggg

SEQ ID NO: 352 - DNA, 203 bp, synthetic construct
  source 1..203: mol_type = other DNA
gccaccatggactacaaagacgatgacgacaagggcccggctgtggctgaggagcccctccaccgaccgtgagtttgggcaacacatattaatttcctccacttagttctacacctcattcattcattcagtgagtgtttctcgactactatgaataaaccgttatactccatgttgcgggcagaatggggatctggacaggg

SEQ ID NO: 353 - DNA, 214 bp, synthetic construct
  source 1..214: mol_type = other DNA
gccaccatggactacaaagacgatgacgacaagggcccggctgtggctgaggagcccctccaccgaccgttgaattgggctgcatgactgcatggttgcatgaacacatccacttagttctacacctcattcattcattcagtgagtgtttctcgactactatgaataaaccgttatactccatgttgcgggcagaatggggatctggacaggg

SEQ ID NO: 354 - DNA, 225 bp, synthetic construct
  source 1..225: mol_type = other DNA
gccaccatggactacaaagacgatgacgacaagggcccggctgtggctgaggagcccctccaccgaccgtgagtttgggctgcatgactgcatggttgcatgaacacatattaatttcctccacttagttctacacctcattcattcattcagtgagtgtttctcgactactatgaataaaccgttatactccatgttgcgggcagaatggggatctggacaggg

SEQ ID NO: 355 - DNA, 203 bp, synthetic construct
  source 1..203: mol_type = other DNA
gccaccatggactacaaagacgatgacgacaagggcccggctgtggctgaggagcccctccaccgaccgtaagtttgggcaacacatattaatttcctccacttagttctacacctcattcattcattcagtgagtgtttctcgactactatgaataaaccgttatactccatgttgcgggcagaatggggatctggacaggg

SEQ ID NO: 356 - DNA, 192 bp, synthetic construct
  source 1..192: mol_type = other DNA
gccaccatggactacaaagacgatgacgacaagggcccggctgtggctgaggagcccctccaccgaccgtaagtttgggcaacacatccacttagttctacacctcattcattcattcagtgagtgtttctcgactactatgaataaaccgttatactccatgttgcgggcagaatggggatctggacaggg

SEQ ID NO: 357 - DNA, 280 bp, synthetic construct
  source 1..280: mol_type = other DNA
gccaccatggactacaaagacgatgacgacaagggcccggctgtggctgaggagcccctccaccgaccgtaagtttgggctgcatgactgcatggttgcatgaacacatattaatttcctccacttagttctacacctcattcattcattcagtgagtgtttctcgactactatgaataaaccgttatactccatgttgcgggcagaatggggatctggctggcggccgctcgagcatgcatctagagggccctattctatagtgtcacctaaatgctag

SEQ ID NO: 358 - DNA, 175 bp, synthetic construct
  source 1..175: mol_type = other DNA
gccaccatggactacaaagacgatgacgacaagggcccggctgtggctgaggagcccctccaccgaccgtaagtttgggctgcatgactgcatggttgcatgaacacatattaatttccactatgaataaaccgttatactccatgttgcgggcagaatggggatctggacaggg

SEQ ID NO: 359 - DNA, 395 bp, synthetic construct
  source 1..395: mol_type = other DNA
gccaccatggactacaaagacgatgacgacaagggcccggctgtggctgaggagcccctccaccgaccgtaagtttgggcatacttacctggcaggggagataccatgatcacgaaggtggttttcccagggcgaggcttatccattgcactccggatgtgctgacccctgcgatttccccaaatgtgggaaactcgactgcataatttgtggtagtgggggactgcgttcgcgctttcccctgggtttctgcatgactgcatggttgcatgaacacatattaatttcctccacttagttctacacctcattcattcattcagtgagtgtttctcgactactatgaataaaccgttatactccatgttgcgggcagaatggggatctggacaggg

SEQ ID NO: 360 - DNA, 260 bp, synthetic construct
  source 1..260: mol_type = other DNA
gccaccatggactacaaagacgatgacgacaagggcccggctgtggctgaggagcccctccaccgaccgtaagtttgggctgcgatttccccaaatgtgggaaactcggggtttctgcatgactgcatggttgcatgaacacatattaatttcctccacttagttctacacctcattcattcattcagtgagtgtttctcgactactatgaataaaccgttatactccatgttgcgggcagaatggggatctggacaggg

SEQ ID NO: 361 - DNA, 273 bp, synthetic construct
  source 1..273: mol_type = other DNA
gccaccatggactacaaagacgatgacgacaagggcccggctgtggctgaggagcccctccaccgaccgtaagtttgggcataatttgtggtagtgggggactgcgttcgcgctttcccctgggtttctgcatgactgcatggttgcatgaacacatattaatttcctccacttagttctacacctcattcattcattcagtgagtgtttctcgactactatgaataaaccgttatactccatgttgcgggcagaatggggatctggacaggg

SEQ ID NO: 362 - DNA, 260 bp, synthetic construct
  source 1..260: mol_type = other DNA
gccaccatggactacaaagacgatgacgacaagggcccggctgtggctgaggagcccctccaccgaccgtaagtttgggctgcatgactgcatggttgcatgtgcgatttccccaaatgtgggaaactcggggtttcaacacatattaatttcctccacttagttctacacctcattcattcattcagtgagtgtttctcgactactatgaataaaccgttatactccatgttgcgggcagaatggggatctggacaggg

SEQ ID NO: 363 - DNA, 225 bp, synthetic construct
  source 1..225: mol_type = other DNA
gccaccatggactacaaagacgatgacgacaagggcccggctgtggctgaggagcccctccaccgaccgtaagtttgggctttgggactttggggttttgggaacacatattaatttcctccacttagttctacacctcattcattcattcagtgagtgtttctcgactactatgaataaaccgttatactccatgttgcgggcagaatggggatctggacaggg

SEQ ID NO: 364 - DNA, 225 bp, synthetic construct
  source 1..225: mol_type = other DNA
gccaccatggactacaaagacgatgacgacaagggcccggctgtggctgaggagcccctccaccgaccgtaagtttgggctttgggacgagggggttgcatgaacacatattaatttcctccacttagttctacacctcattcattcattcagtgagtgtttctcgactactatgaataaaccgttatactccatgttgcgggcagaatggggatctggacaggg

SEQ ID NO: 365 - DNA, 246 bp, synthetic construct
  source 1..246: mol_type = other DNA
gccaccatggactacaaagacgatgacgacaagggcccggctgtggctgaggagcccctccaccgaccgtaagtttgggctttgggctttgggacgaggggcgagggggttgcatgctgcatgaacacatattaatttcctccacttagttctacacctcattcattcattcagtgagtgtttctcgactactatgaataaaccgttatactccatgttgcgggcagaatggggatctggacaggg

SEQ ID NO: 366 - DNA, 240 bp, synthetic construct
  source 1..240: mol_type = other DNA
gcaaggcggaggaaggccaccatggactacaaagacgatgacgacaagggcccggctgtggctgaggagcccctccaccgaccgtaagtttgggctgcatgactgcatggttgcatgaacacatattaatttcctccacttagttctacacctcattcattcattcagtgagtgtttctcgactactatgaataaaccgttatactccatgttgcgggcagaatggggatctggacaggg

SEQ ID NO: 367 - DNA, 271 bp, synthetic construct
  source 1..271: mol_type = other DNA
gcaaggcggaggaaaggcaaggcggaggaaggcaaggcggaggaaggccaccatggactacaaagacgatgacgacaagggcccggctgtggctgaggagcccctccaccgaccgtaagtttgggctgcatgactgcatggttgcatgaacacatattaatttcctccacttagttctacacctcattcattcattcagtgagtgtttctcgactactatgaataaaccgttatactccatgttgcgggcagaatggggatctggacaggg

SEQ ID NO: 368 - DNA, 267 bp, synthetic construct
  source 1..267: mol_type = other DNA
gcacacaggaccacacaggacgcacacaggaccacacaggacgccaccatggactacaaagacgatgacgacaagggcccggctgtggctgaggagcccctccaccgaccgtaagtttgggctgcatgactgcatggttgcatgaacacatattaatttcctccacttagttctacacctcattcattcattcagtgagtgtttctcgactactatgaataaaccgttatactccatgttgcgggcagaatggggatctggacaggg

SEQ ID NO: 369 - DNA, 250 bp, synthetic construct
  source 1..250: mol_type = other DNA
gaaaaagaaagaaaaaaagaaagaagccaccatggactacaaagacgatgacgacaagggcccggctgtggctgaggagcccctccaccgaccgtaagtttgggctgcatgactgcatggttgcatgaacacatattaatttcctccacttagttctacacctcattcattcattcagtgagtgtttctcgactactatgaataaaccgttatactccatgttgcgggcagaatggggatctggacaggg

SEQ ID NO: 370 - DNA, 259 bp, synthetic construct
  source 1..259: mol_type = other DNA
gtcagaggatcagaggagtcagaggatcagaggagccaccatggactacaaagacgatgacgacaagggcccggctgtggctgaggagcccctccaccgaccgtaagtttgggctgcatgactgcatggttgcatgaacacatattaatttcctccacttagttctacacctcattcattcattcagtgagtgtttctcgactactatgaataaaccgttatactccatgttgcgggcagaatggggatctggacaggg

SEQ ID NO: 371 - DNA, 235 bp, synthetic construct
  source 1..235: mol_type = other DNA
gcccggctgtggctgaggagcccctccaccgaccgtaagtttgggctgcatgactgcatggttgcatgaacacatattaatttcctccacttagttctacacctcattcattcattcagtgagtgtttctcgactactatgaataaaccgttatactccatgttgcgggcagaatggggatctggacagggaagcacagggcacgagttcaccaatggctgtcaagctacgctgc

SEQ ID NO: 372 - DNA, 379 bp, synthetic construct
  source 1..379: mol_type = other DNA
tcacactttggacctcattttcatctaaggaaggtggtataatatctcccagggatacaggaacctcagggagagataagactactgtcatgtgtgcccctctctctaccatttctggaaacaataccaggaggcagaattcaggcatccaacgacttactctcttcttttttttctgcagagcaagggagggattctatccaaagcttgtgattatatccaggagcttcggcagagtaaccaccgcttgtctgaagaactgcagggacttgaccaactgcagctggacaatgacgtgcttcgacaacaggactacaaggaccacgacggtgactacaaggaccacgacatcgactacaaggacgacgacgacaagtaa

SEQ ID NO: 373 - DNA, 379 bp, synthetic construct
  source 1..379: mol_type = other DNA
ttgaccaagtggagggtgctcttccagctcttgaacaggacctagagagttggatgtattagatgggcgtacgcagtatgtgcccagttgtatgattgtgcgttttcaaggaagggagtgtgcgtcgattcgttcagtatcgacagggggaacgacttactctcttcttttttttctgcagagcaagggagggattctatccaaagcttgtgattatatccaggagcttcggcagagtaaccaccgcttgtctgaagaactgcagggacttgaccaactgcagctggacaatgacgtgcttcgacaacaggactacaaggaccacgacggtgactacaaggaccacgacatcgactacaaggacgacgacgacaagtaa

SEQ ID NO: 374 - DNA, 409 bp, synthetic construct
  source 1..409: mol_type = other DNA
agacccaagcttggtaccgagctcggatcctcacactttggacctcattttcatctaaggaaggtggtataatatctcccagggatacaggaacctcagggagagataagactactgtcatgtgtgcccctctctctaccatttctggaaacaataccaggaggcagaattcaggcatccaacgacttactctcttcttttttttctgcagagcaagggagggattctatccaaagcttgtgattatatccaggagcttcggcagagtaaccaccgcttgtctgaagaactgcagggacttgaccaactgcagctggacaatgacgtgcttcgacaacaggactacaaggaccacgacggtgactacaaggaccacgacatcgactacaaggacgacgacgacaagtaa

SEQ ID NO: 375 - DNA, 248 bp, synthetic construct
  source 1..248: mol_type = other DNA
taaatcaaacgtccacataaagaatgaggtggtaaaatgaacaagcactacggttctatcgttctctgttctgttaaatcctggctccagggagaaaacactcaaacgtttttctcctaaagatcttttaagatttccaaaccaaatgttaacgacttactctcttcttttttttctgcaggctcaagcgcaaaagaagaaagatgaggcagaggtccaaggactacaaagacgatgacgacaagtaa

SEQ ID NO: 376 - DNA, 289 bp, synthetic construct
  source 1..289: mol_type = other DNA
ggaacagaaaatataaagtttctgaggagaattcaaatgaagccaaaacctcaaaaaagatacatgcaggacctgcaggcagtatccccaagagaaggctccctgttggccaggtgcagtggctcacgcctgtaatgccagcactttgagaacgaggaattctcttcttttttttctgcaggacctcgagcagaaaatgaaagtggtagagaatctccaggatgactttgatttcaactataaaaccctcaagagtcaaggagactacaaagacgatgacgacaagtaa

SEQ ID NO: 377 - DNA, 328 bp, synthetic construct
  source 1..328: mol_type = other DNA
atgtggcttctcagggacattgcgttcagctgcactctgtatacctcaggggtgggaccagcacgtcactgagtgaaggaggggagggaggctctggcagttgtgcagccttcctggctgggctctgagggggctggaagaatttagaacaacgaggaattctcttcttttttttctgcaggaagttgttcggaaggtggagagcaccaagacagacagccgggataaacccctgaaggatgtgatcatcgcagactgcggcaagatcgaggtggagaagccctttgccatcgccaaggaggactacaaagacgatgacgacaagtaa

SEQ ID NO: 378 - DNA, 289 bp, synthetic construct
  source 1..289: mol_type = other DNA
gaggagcctagaaggcgccgggttggcaagtgggcagggaacagagacatgctttgtcgtgttctcagcggagctggggtaccttggtggtctcaggcgtgagacagggactgcctgaaggcagaggcaccaaaagctacaagagcaaacaacgacttactctcttcttttttttctgcagtccctgttcgaacgccagggcctcccaggcccagagaagctgccgggctccttgcggaaggggattccacggaccaagtctgactacaaagacgatgacgacaagtaa

SEQ ID NO: 379 - DNA, 269 bp, synthetic construct
  source 1..269: mol_type = other DNA
gccaccatggactacaaagacgatgacgacaagggcccggctgtggctgaggagcccctccaccgaccgtgagtttgggctgcatgactgcatggttgcatgaacacatattaatttcctccacttagttctacacctcattcattcattcagtgagtgtttctcgactactatgaataaaccgttatactccatgttgcgggcagaatggggatctggacagggaagcacagggcacgagttcaccaatggctgtcaagctacgctgc

SEQ ID NO: 380-383 - skipped (4 entries)

SEQ ID NO: 384 - DNA, 424 bp, synthetic construct
  source 1..424: mol_type = other DNA
gccaccatggactacaaagacgatgacgacaagaaccccagtgcccccagctaccccatggcctcgctctacgtgggggacctccaccccgacgtgaccgaggcgatgctctacgagaagttcagcccggccgggcccatcctctccatccgggtctgcagggacatgatcacccgccgctccttgggctacgcgtatgtgaacttccagcagccagctgatggtgagtttgggctgcatgactgcatggttgcatgaacacatattaatttcccaatattacttcaaaatttttgctggctacttaagattatataaactatggtgactggagtgggaggacacatggtctcacagttgaacgcttcctctttaagcttcaagatggctagacctttcaagtatcacacactagtgtgggacc

SEQ ID NO: 385 - DNA, 424 bp, synthetic construct
  source 1..424: mol_type = other DNA
gccaccatggactacaaagacgatgacgacaagaaccccagtgcccccagctaccccatggcctcgctctacgtgggggacctccaccccgacgtgaccgaggcgatgctctacgagaagttcagcccggccgggcccatcctctccatccgggtctgcagggacatgatcacccgccgctccttgggctacgcgtatgtgaacttccagcagccagctgatggtgagtttgggctgcatgactgcatggttgcatgaacacatattaatttccgctacttaagattatataaactatggtgactggagtgggaggacacatggtctcacagttgaacgcttcctctttaagcttcaagatggctagacctttcaagtatcacacactagtgtgggacctaagttgtataaagcaaagacaaat

SEQ ID NO: 386 - DNA, 424 bp, synthetic construct
  source 1..424: mol_type = other DNA
gccaccatggactacaaagacgatgacgacaagaaccccagtgcccccagctaccccatggcctcgctctacgtgggggacctccaccccgacgtgaccgaggcgatgctctacgagaagttcagcccggccgggcccatcctctccatccgggtctgcagggacatgatcacccgccgctccttgggctacgcgtatgtgaacttccagcagccagctgatggtgagtttgggctgcatgactgcatggttgcatgaacacatattaatttccgtgactggagtgggaggacacatggtctcacagttgaacgcttcctctttaagcttcaagatggctagacctttcaagtatcacacactagtgtgggacctaagttgtataaagcaaagacaaataccagaagcccccgaaatttctcac

SEQ ID NO: 387 - DNA, 424 bp, synthetic construct
  source 1..424: mol_type = other DNA
gccaccatggactacaaagacgatgacgacaagaaccccagtgcccccagctaccccatggcctcgctctacgtgggggacctccaccccgacgtgaccgaggcgatgctctacgagaagttcagcccggccgggcccatcctctccatccgggtctgcagggacatgatcacccgccgctccttgggctacgcgtatgtgaacttccagcagccagctgatggtgagtttgggctgcatgactgcatggttgcatgaacacatattaatttcctctcacagttgaacgcttcctctttaagcttcaagatggctagacctttcaagtatcacacactagtgtgggacctaagttgtataaagcaaagacaaataccagaagcccccgaaatttctcacatataaaagaattccatattgctaa

SEQ ID NO: 388 - DNA, 366 bp, synthetic construct
  source 1..366: mol_type = other DNA
gccaccatggactacaaagacgatgacgacaagctgcgcctctccgaacgcaacatgaaggtgctccttgccgccgccctcatcgcggggtccgtcttcttcctgctgctgccgggaccttctgcggccgatgagaagaagaaggggcccaaagttacagtgaaggtgagtttgggctgcatgactgcatggttgcatgaacacatattaatttcccttagcttctttaaaggggcgttgctaggggagggaaggtacaagaagctaacctgaggatgggagagagaatagagccatatttttagagaagtggttctgaatctgattttggtgacggtaaaaatcctatgagaatctaatgaaagc

SEQ ID NO: 389 - DNA, 366 bp, synthetic construct
  source 1..366: mol_type = other DNA
gccaccatggactacaaagacgatgacgacaagctgcgcctctccgaacgcaacatgaaggtgctccttgccgccgccctcatcgcggggtccgtcttcttcctgctgctgccgggaccttctgcggccgatgagaagaagaaggggcccaaagttacagtgaaggtgagtttgggctgcatgactgcatggttgcatgaacacatattaatttcctaggggagggaaggtacaagaagctaacctgaggatgggagagagaatagagccatatttttagagaagtggttctgaatctgattttggtgacggtaaaaatcctatgagaatctaatgaaagctccagacccttttcttggaaaacat

SEQ ID NO: 390 - DNA, 366 bp, synthetic construct
  source 1..366: mol_type = other DNA
gccaccatggactacaaagacgatgacgacaagctgcgcctctccgaacgcaacatgaaggtgctccttgccgccgccctcatcgcggggtccgtcttcttcctgctgctgccgggaccttctgcggccgatgagaagaagaaggggcccaaagttacagtgaaggtgagtttgggctgcatgactgcatggttgcatgaacacatattaatttccaacctgaggatgggagagagaatagagccatatttttagagaagtggttctgaatctgattttggtgacggtaaaaatcctatgagaatctaatgaaagctccagacccttttcttggaaaacatgcttatctataccctccttggacta

SEQ ID NO: 391 - DNA, 366 bp, synthetic construct
  source 1..366: mol_type = other DNA
gccaccatggactacaaagacgatgacgacaagctgcgcctctccgaacgcaacatgaaggtgctccttgccgccgccctcatcgcggggtccgtcttcttcctgctgctgccgggaccttctgcggccgatgagaagaagaaggggcccaaagttacagtgaaggtgagtttgggctgcatgactgcatggttgcatgaacacatattaatttccagccatatttttagagaagtggttctgaatctgattttggtgacggtaaaaatcctatgagaatctaatgaaagctccagacccttttcttggaaaacatgcttatctataccctccttggactacaggataacaatatttgctctaaac

SEQ ID NO: 392 - DNA, 266 bp, synthetic construct
  source 1..266: mol_type = other DNA
gccaccatggactacaaagacgatgacgacaagagagccaagtggaggaagaagcgaatgcggcggtgagtttgggctgcatgactgcatggttgcatgaacacatattaatttccccagagttgcctttccctcccacattaaatcaaacgtccacataaagaatgaggtggtaaaatgaacaagcactacggttctatcgttctctgttctgttaaatcctggctccagggagaaaacactcaaacgtttttctcctaaagatc

SEQ ID NO: 393 - DNA, 266 bp, synthetic construct
  source 1..266: mol_type = other DNA
gccaccatggactacaaagacgatgacgacaagagagccaagtggaggaagaagcgaatgcggcggtgagtttgggctgcatgactgcatggttgcatgaacacatattaatttcctaaatcaaacgtccacataaagaatgaggtggtaaaatgaacaagcactacggttctatcgttctctgttctgttaaatcctggctccagggagaaaacactcaaacgtttttctcctaaagatcttttaagatttccaaaccaaatgtt

SEQ ID NO: 394 - DNA, 266 bp, synthetic construct
  source 1..266: mol_type = other DNA
gccaccatggactacaaagacgatgacgacaagagagccaagtggaggaagaagcgaatgcggcggtgagtttgggctgcatgactgcatggttgcatgaacacatattaatttccgaggtggtaaaatgaacaagcactacggttctatcgttctctgttctgttaaatcctggctccagggagaaaacactcaaacgtttttctcctaaagatcttttaagatttccaaaccaaatgtttctcctaagttttgtccaaggaact

SEQ ID NO: 395 - DNA, 266 bp, synthetic construct
  source 1..266: mol_type = other DNA
gccaccatggactacaaagacgatgacgacaagagagccaagtggaggaagaagcgaatgcggcggtgagtttgggctgcatgactgcatggttgcatgaacacatattaatttcccggttctatcgttctctgttctgttaaatcctggctccagggagaaaacactcaaacgtttttctcctaaagatcttttaagatttccaaaccaaatgtttctcctaagttttgtccaaggaacttccctcctcctgggctggcaaagtc

SEQ ID NO: 396 - DNA, 337 bp, synthetic construct
  source 1..337: mol_type = other DNA
tcacactttggacctcattttcatctaaggaaggtggtataatatctcccagggatacaggaacctcagggagagataagactactgtcatgtgtgcccctctctctaccatttctggaaacaataccaggaggcagaattcaggcatccaacgaggaattctcttcttttttttctgcagagcaagggagggattctatccaaagcttgtgattatatccaggagcttcggcagagtaaccaccgcttgtctgaagaactgcagggacttgaccaactgcagctggacaatgacgtgcttcgacaacaggactacaaagacgatgacgacaagtaa

SEQ ID NO: 397 - DNA, 367 bp, synthetic construct
  source 1..367: mol_type = other DNA
atgtggcttctcagggacattgcgttcagctgcactctgtatacctcaggggtgggaccagcacgtcactgagtgaaggaggggagggaggctctggcagttgtgcagccttcctggctgggctctgagggggctggaagaatttagaacaacgacttactctcttcttttttttctgcaggaagttgttcggaaggtggagagcaccaagacagacagccgggataaacccctgaaggatgtgatcatcgcagactgcggcaagatcgaggtggagaagccctttgccatcgccaaggaggactacaaggaccacgacggtgactacaaggaccacgacatcgactacaaggacgacgacgacaag

SEQ ID NO: 398 - DNA, 610 bp, synthetic construct
  source 1..610: mol_type = other DNA
atgtggcttctcagggacattgcgttcagctgcactctgtatacctcaggggtgggaccagcacgtcactgagtgaaggaggggagggaggctctggcagttgtgcagccttcctggctgggctctgagggggctggaagaatttagaacaacgacttactctcttcttttttttctgcaggaagttgttcggaaggtggagagcaccaagacagacagccgggataaacccctgaaggatgtgatcatcgcagactgcggcaagatcgaggtggagaagccctttgccatcgccaaggagggagggccgagctctggcgcacccccaccaagtggagggtctcctgccgggtccccaacatctactgaagaaggcaccagcgaatccgcaacgcccgagtcaggccctggtacctccacagaaccatctgaaggtagtgcgcctggttccccagctggaagccctacttccaccgaagaaggcacgtcaaccgaaccaagtgaaggatctgcccctgggaccagcactgaaccatctgaggactacaaggaccacgacggtgactacaaggaccacgacatcgactacaaggacgacgacgacaagtaa

SEQ ID NO: 399 - DNA, 2047 bp, synthetic construct
  source 1..2047: mol_type = other DNA
ggaacagaaaatataaagtttctgaggagaattcaaatgaagccaaaacctcaaaaaagatacatgcaggacctgcaggcagtatccccaagagaaggctccctgttggccaggtgcagtggctcacgcctgtaatgccagcactttgagaacgattaattctcttcttttttttctgcaggatctagaacagaaaatgaaagtggtagagaatctccaggatgactttgatttcaactataaaaccctcaagagtcaaggagacatgcaagatctgaatggaaacaaccagtcagtgaccaggcagaagatgcagcagctggaacagatgctcactgcgctggaccagatgcggagaagcatcgtgagtgagctggcggggcttttgtcagcgatggagtacgtgcagaaaactctcacggacgaggagctggctgactggaagaggcggcaacagattgcctgcattggaggcccgcccaacatctgcctagatcggctagaaaactggataacgtcattagcagaatctcaacttcagacccgtcaacaaattaagaaactggaggagttgcagcaaaaagtttcctacaaaggggaccccattgtacagcaccggccgatgctggaggagagaatcgtggagctgtttagaaacttaatgaaaagtgcctttgtggtggagcggcagccctgcatgcccatgcatcctgaccggcccctcgtcatcaagaccggcgtccagttcactactaaagtcaggttgctggtcaaattccctgagttgaattatcagcttaaaattaaagtgtgcattgacaaagactctggggacgttgcagctctcagaggatcccggaaatttaacattctgggcacaaacacaaaagtgatgaacatggaagaatccaacaacggcagcctctctgcagaattcaaacacttgaccctgagggagcagagatgtgggaatgggggccgagccaattgtgatgcttccctgattgtgactgaggagctgcacctgatcacctttgagaccgaggtgtatcaccaaggcctcaagattgacctagagacccactccttgccagttgtggtgatctccaacatctgtcagatgccaaatgcctgggcgtccatcctgtggtacaacatgctgaccaacaatcccaagaatgtaaacttttttaccaagcccccaattggaacctgggatcaagtggccgaggtcctgagctggcagttctcctccaccaccaagcgaggactgagcatcgagcagctgactacactggcagagaaactcttgggacctggtgtgaattattcagggtgtcagatcacatgggctaaattttgcaaagaaaacatggctggcaagggcttctccttctgggtctggctggacaatatcattgaccttgtgaaaaagtacatcctggccctttggaacgaagggtacatcatgggctttatcagtaaggagcgggagcgggccatcttgagcactaagcctccaggcaccttcctgctaagattcagtgaaagcagcaaagaaggaggcgtcactttcacttgggtggagaaggacatcagcggtaagacccagatccagtccgtggaaccatacacaaagcagcagctgaacaacatgtcatttgctgaaatcatcatgggctataagatcatggatgctaccaatatcctggtgtctccactggtctatctctatcctgacattcccaaggaggaggcattcggaaagtattgtcggccagagagccaggagcatcctgaagctgacccaggcgctgccccatacctgaagaccaagtttatctgtgtgacaccaacgacctgcagcaataccattgacctgccgatgtccccccgcactttagattcattgatgcagtttggaaataatggtgaaggtgctgaaccctcagcaggagggcagtttgagtccctcacctttgacatggagttgacctcggagtgcgctacctcccccatggactacaaagacgatgacgacaagtaa

SEQ ID NO: 400 - DNA, 447 bp, synthetic construct
  source 1..447: mol_type = other DNA
ggaacagaaaatataaagtttctgaggagaattcaaatgaagccaaaacctcaaaaaagatacatgcaggacctgcaggcagtatccccaagagaaggctccctgttggccaggtgcagtggctcacgcctgtaatgccagcactttgagaacgattaattctcttcttttttttctgcaggatctagaacagaaaatgaaagtggtagagaatctccaggatgactttgatttcaactataaaaccctcaagagtcaaggagacatgcaagatctgaatggaaacaaccagtcagtgaccaggcagaagatgcagcagctggaacagatgctcactgcgctggaccagatgcggagaagcatcgtgagtgagctggcggggcttttgtcagcgatggagtacgtgcagaaaactctcacgactacaaagacgatgacgacaagtaa

SEQ ID NO: 401 - DNA, 647 bp, synthetic construct
  source 1..647: mol_type = other DNA
ggaacagaaaatataaagtttctgaggagaattcaaatgaagccaaaacctcaaaaaagatacatgcaggacctgcaggcagtatccccaagagaaggctccctgttggccaggtgcagtggctcacgcctgtaatgccagcactttgagaacgattaattctcttcttttttttctgcaggatctagaacagaaaatgaaagtggtagagaatctccaggatgactttgatttcaactataaaaccctcaagagtcaaggagacatgcaagatctgaatggaaacaaccagtcagtgaccaggcagaagatgcagcagctggaacagatgctcactgcgctggaccagatgcggagaagcatcgtgagtgagctggcggggcttttgtcagcgatggagtacgtgcagaaaactctcacggacgaggagctggctgactggaagaggcggcaacagattgcctgcattggaggcccgcccaacatctgcctagatcggctagaaaactggataacgtcattagcagaatctcaacttcagacccgtcaacaaattaagaaactggaggagttgcagcaaaaagtttcctacaaaggggaccccattgtacagcaccggcgactacaaagacgatgacgacaagtaa

SEQ ID NO: 402 - DNA, 847 bp, synthetic construct
  source 1..847: mol_type = other DNA
ggaacagaaaatataaagtttctgaggagaattcaaatgaagccaaaacctcaaaaaagatacatgcaggacctgcaggcagtatccccaagagaaggctccctgttggccaggtgcagtggctcacgcctgtaatgccagcactttgagaacgattaattctcttcttttttttctgcaggatctagaacagaaaatgaaagtggtagagaatctccaggatgactttgatttcaactataaaaccctcaagagtcaaggagacatgcaagatctgaatggaaacaaccagtcagtgaccaggcagaagatgcagcagctggaacagatgctcactgcgctggaccagatgcggagaagcatcgtgagtgagctggcggggcttttgtcagcgatggagtacgtgcagaaaactctcacggacgaggagctggctgactggaagaggcggcaacagattgcctgcattggaggcccgcccaacatctgcctagatcggctagaaaactggataacgtcattagcagaatctcaacttcagacccgtcaacaaattaagaaactggaggagttgcagcaaaaagtttcctacaaaggggaccccattgtacagcaccggccgatgctggaggagagaatcgtggagctgtttagaaacttaatgaaaagtgcctttgtggtggagcggcagccctgcatgcccatgcatcctgaccggcccctcgtcatcaagaccggcgtccagttcactactaaagtcaggttgctggtcaaattccctgagttgaattatcagcttaaaattaaagtgtgcattgacgactacaaagacgatgacgacaagtaa

SEQ ID NO: 403 - DNA, 1047 bp, synthetic construct
  source 1..1047: mol_type = other DNA
ggaacagaaaatataaagtttctgaggagaattcaaatgaagccaaaacctcaaaaaagatacatgcaggacctgcaggcagtatccccaagagaaggctccctgttggccaggtgcagtggctcacgcctgtaatgccagcactttgagaacgattaattctcttcttttttttctgcaggatctagaacagaaaatgaaagtggtagagaatctccaggatgactttgatttcaactataaaaccctcaagagtcaaggagacatgcaagatctgaatggaaacaaccagtcagtgaccaggcagaagatgcagcagctggaacagatgctcactgcgctggaccagatgcggagaagcatcgtgagtgagctggcggggcttttgtcagcgatggagtacgtgcagaaaactctcacggacgaggagctggctgactggaagaggcggcaacagattgcctgcattggaggcccgcccaacatctgcctagatcggctagaaaactggataacgtcattagcagaatctcaacttcagacccgtcaacaaattaagaaactggaggagttgcagcaaaaagtttcctacaaaggggaccccattgtacagcaccggccgatgctggaggagagaatcgtggagctgtttagaaacttaatgaaaagtgcctttgtggtggagcggcagccctgcatgcccatgcatcctgaccggcccctcgtcatcaagaccggcgtccagttcactactaaagtcaggttgctggtcaaattccctgagttgaattatcagcttaaaattaaagtgtgcattgacaaagactctggggacgttgcagctctcagaggatcccggaaatttaacattctgggcacaaacacaaaagtgatgaacatggaagaatccaacaacggcagcctctctgcagaattcaaacacttgaccctgagggagcagagatgtgggaatgggggccgagccaattgtgatgcttccctgattgtgactgaggagctgactacaaagacgatgacgacaagtaa

SEQ ID NO: 404 - DNA, 1247 bp, synthetic construct
  source 1..1247: mol_type = other DNA
ggaacagaaaatataaagtttctgaggagaattcaaatgaagccaaaacctcaaaaaagatacatgcaggacctgcaggcagtatccccaagagaaggctccctgttggccaggtgcagtggctcacgcctgtaatgccagcactttgagaacgattaattctcttcttttttttctgcaggatctagaacagaaaatgaaagtggtagagaatctccaggatgactttgatttcaactataaaaccctcaagagtcaaggagacatgcaagatctgaatggaaacaaccagtcagtgaccaggcagaagatgcagcagctggaacagatgctcactgcgctggaccagatgcggagaagcatcgtgagtgagctggcggggcttttgtcagcgatggagtacgtgcagaaaactctcacggacgaggagctggctgactggaagaggcggcaacagattgcctgcattggaggcccgcccaacatctgcctagatcggctagaaaactggataacgtcattagcagaatctcaacttcagacccgtcaacaaattaagaaactggaggagttgcagcaaaaagtttcctacaaaggggaccccattgtacagcaccggccgatgctggaggagagaatcgtggagctgtttagaaacttaatgaaaagtgcctttgtggtggagcggcagccctgcatgcccatgcatcctgaccggcccctcgtcatcaagaccggcgtccagttcactactaaagtcaggttgctggtcaaattccctgagttgaattatcagcttaaaattaaagtgtgcattgacaaagactctggggacgttgcagctctcagaggatcccggaaatttaacattctgggcacaaacacaaaagtgatgaacatggaagaatccaacaacggcagcctctctgcagaattcaaacacttgaccctgagggagcagagatgtgggaatgggggccgagccaattgtgatgcttccctgattgtgactgaggagctgcacctgatcacctttgagaccgaggtgtatcaccaaggcctcaagattgacctagagacccactccttgccagttgtggtgatctccaacatctgtcagatgccaaatgcctgggcgtccatcctgtggtacaacatgctgaccaacaatcccaagaatgtaaacttttttaccaagcccccaattggaacctgggatcgactacaaagacgatgacgacaagtaa

SEQ ID NO: 405 - DNA, 1447 bp, synthetic construct
  source 1..1447: mol_type = other DNA
ggaacagaaaatataaagtttctgaggagaattcaaatgaagccaaaacctcaaaaaagatacatgcaggacctgcaggcagtatccccaagagaaggctccctgttggccaggtgcagtggctcacgcctgtaatgccagcactttgagaacgattaattctcttcttttttttctgcaggatctagaacagaaaatgaaagtggtagagaatctccaggatgactttgatttcaactataaaaccctcaagagtcaaggagacatgcaagatctgaatggaaacaaccagtcagtgaccaggcagaagatgcagcagctggaacagatgctcactgcgctggaccagatgcggagaagcatcgtgagtgagctggcggggcttttgtcagcgatggagtacgtgcagaaaactctcacggacgaggagctggctgactggaagaggcggcaacagattgcctgcattggaggcccgcccaacatctgcctagatcggctagaaaactggataacgtcattagcagaatctcaacttcagacccgtcaacaaattaagaaactggaggagttgcagcaaaaagtttcctacaaaggggaccccattgtacagcaccggccgatgctggaggagagaatcgtggagctgtttagaaacttaatgaaaagtgcctttgtggtggagcggcagccctgcatgcccatgcatcctgaccggcccctcgtcatcaagaccggcgtccagttcactactaaagtcaggttgctggtcaaattccctgagttgaattatcagcttaaaattaaagtgtgcattgacaaagactctggggacgttgcagctctcagaggatcccggaaatttaacattctgggcacaaacacaaaagtgatgaacatggaagaatccaacaacggcagcctctctgcagaattcaaacacttgaccctgagggagcagagatgtgggaatgggggccgagccaattgtgatgcttccctgattgtgactgaggagctgcacctgatcacctttgagaccgaggtgtatcaccaaggcctcaagattgacctagagacccactccttgccagttgtggtgatctccaacatctgtcagatgccaaatgcctgggcgtccatcctgtggtacaacatgctgaccaacaatcccaagaatgtaaacttttttaccaagcccccaattggaacctgggatcaagtggccgaggtcctgagctggcagttctcctccaccaccaagcgaggactgagcatcgagcagctgactacactggcagagaaactcttgggacctggtgtgaattattcagggtgtcagatcacatgggctaaattttgcaaagaaaacatggctggcaagggcttctccttctgggtctggctggacaatatcattgactacaaagacgatgacgacaagtaa

SEQ ID NO: 406 - DNA, 1647 bp, synthetic construct
  source 1..1647: mol_type = other DNA
ggaacagaaaatataaagtttctgaggagaattcaaatgaagccaaaacctcaaaaaagatacatgcaggacctgcaggcagtatccccaagagaaggctccctgttggccaggtgcagtggctcacgcctgtaatgccagcactttgagaacgattaattctcttcttttttttctgcaggatctagaacagaaaatgaaagtggtagagaatctccaggatgactttgatttcaactataaaaccctcaagagtcaaggagacatgcaagatctgaatggaaacaaccagtcagtgaccaggcagaagatgcagcagctggaacagatgctcactgcgctggaccagatgcggagaagcatcgtgagtgagctggcggggcttttgtcagcgatggagtacgtgcagaaaactctcacggacgaggagctggctgactggaagaggcggcaacagattgcctgcattggaggcccgcccaacatctgcctagatcggctagaaaactggataacgtcattagcagaatctcaacttcagacccgtcaacaaattaagaaactggaggagttgcagcaaaaagtttcctacaaaggggaccccattgtacagcaccggccgatgctggaggagagaatcgtggagctgtttagaaacttaatgaaaagtgcctttgtggtggagcggcagccctgcatgcccatgcatcctgaccggcccctcgtcatcaagaccggcgtccagttcactactaaagtcaggttgctggtcaaattccctgagttgaattatcagcttaaaattaaagtgtgcattgacaaagactctggggacgttgcagctctcagaggatcccggaaatttaacattctgggcacaaacacaaaagtgatgaacatggaagaatccaacaacggcagcctctctgcagaattcaaacacttgaccctgagggagcagagatgtgggaatgggggccgagccaattgtgatgcttccctgattgtgactgaggagctgcacctgatcacctttgagaccgaggtgtatcaccaaggcctcaagattgacctagagacccactccttgccagttgtggtgatctccaacatctgtcagatgccaaatgcctgggcgtccatcctgtggtacaacatgctgaccaacaatcccaagaatgtaaacttttttaccaagcccccaattggaacctgggatcaagtggccgaggtcctgagctggcagttctcctccaccaccaagcgaggactgagcatcgagcagctgactacactggcagagaaactcttgggacctggtgtgaattattcagggtgtcagatcacatgggctaaattttgcaaagaaaacatggctggcaagggcttctccttctgggtctggctggacaatatcattgaccttgtgaaaaagtacatcctggccctttggaacgaagggtacatcatgggctttatcagtaaggagcgggagcgggccatcttgagcactaagcctccaggcaccttcctgctaagattcagtgaaagcagcaaagaaggaggcgtcactttcacttgggtggagaaggacatcagcggtaagacccagatccagtcgactacaaagacgatgacgacaagtaa

SEQ ID NO: 407 - DNA, 1847 bp, synthetic construct
  source 1..1847: mol_type = other DNA
ggaacagaaaatataaagtttctgaggagaattcaaatgaagccaaaacctcaaaaaagatacatgcaggacctgcaggcagtatccccaagagaaggctccctgttggccaggtgcagtggctcacgcctgtaatgccagcactttgagaacgattaattctcttcttttttttctgcaggatctagaacagaaaatgaaagtggtagagaatctccaggatgactttgatttcaactataaaaccctcaagagtcaaggagacatgcaagatctgaatggaaacaaccagtcagtgaccaggcagaagatgcagcagctggaacagatgctcactgcgctggaccagatgcggagaagcatcgtgagtgagctggcggggcttttgtcagcgatggagtacgtgcagaaaactctcacggacgaggagctggctgactggaagaggcggcaacagattgcctgcattggaggcccgcccaacatctgcctagatcggctagaaaactggataacgtcattagcagaatctcaacttcagacccgtcaacaaattaagaaactggaggagttgcagcaaaaagtttcctacaaaggggaccccattgtacagcaccggccgatgctggaggagagaatcgtggagctgtttagaaacttaatgaaaagtgcctttgtggtggagcggcagccctgcatgcccatgcatcctgaccggcccctcgtcatcaagaccggcgtccagttcactactaaagtcaggttgctggtcaaattccctgagttgaattatcagcttaaaattaaagtgtgcattgacaaagactctggggacgttgcagctctcagaggatcccggaaatttaacattctgggcacaaacacaaaagtgatgaacatggaagaatccaacaacggcagcctctctgcagaattcaaacacttgaccctgagggagcagagatgtgggaatgggggccgagccaattgtgatgcttccctgattgtgactgaggagctgcacctgatcacctttgagaccgaggtgtatcaccaaggcctcaagattgacctagagacccactccttgccagttgtggtgatctccaacatctgtcagatgccaaatgcctgggcgtccatcctgtggtacaacatgctgaccaacaatcccaagaatgtaaacttttttaccaagcccccaattggaacctgggatcaagtggccgaggtcctgagctggcagttctcctccaccaccaagcgaggactgagcatcgagcagctgactacactggcagagaaactcttgggacctggtgtgaattattcagggtgtcagatcacatgggctaaattttgcaaagaaaacatggctggcaagggcttctccttctgggtctggctggacaatatcattgaccttgtgaaaaagtacatcctggccctttggaacgaagggtacatcatgggctttatcagtaaggagcgggagcgggccatcttgagcactaagcctccaggcaccttcctgctaagattcagtgaaagcagcaaagaaggaggcgtcactttcacttgggtggagaaggacatcagcggtaagacccagatccagtccgtggaaccatacacaaagcagcagctgaacaacatgtcatttgctgaaatcatcatgggctataagatcatggatgctaccaatatcctggtgtctccactggtctatctctatcctgacattcccaaggaggaggcattcggaaagtattgtcggccagagagccaggagcatcctgaagctgacccaggcgctgcccgactacaaagacgatgacgacaagtaa

SEQ ID NO: 408 - DNA, 298 bp, synthetic construct
  source 1..298: mol_type = other DNA
ttgagttctattacaccactattctagaattatgaatcgctcccctgcactactctttccttgtcctccccacactcgaaaaatatttctctttctccactagagaaagcagcagcagttgagagtatggctgttggagctgatgggattaacgaggaattctcttcttttttttctgcaggtcgacgaggctgtagctgtactacaagcccaccaagctaaagaggctgcccagaaagcagttaacagtgccaccggtgttccaactgttgactacaaagacgatgacgacaagtaa

SEQ ID NO: 409 - DNA, 362 bp, synthetic construct
  source 1..362: mol_type = other DNA
caatatttattgagcacttgctatgtgtcacgcacatggacataaagtctcaatcctcaaggagctcacagtccagtagaagtttgcaattaacacatattttgttaggtggtgggataaacaagagaagaaaaagtgggaaagtgactgaacgaggaattctcttcttttttttctgcagctccttagcacgattgttatttccaccaaaagatgatcacacgttgaagtttttatatgatgacaaccagcgtgttgagcctgaatggtacattcctattattcccatggtgctgataaatggtgctgaaggaatcggtactgggtggtcctgcaaagactacaaagacgatgacgacaag

SEQ ID NO: 410 - DNA, 179 bp, synthetic construct
  source 1..179: mol_type = other DNA
gaacgaggaattctcttcttttttttctgcaggaagttgttcggaaggtggagagcaccaagacagacagccgggataaacccctgaaggatgtgatcatcgcagactgcggcaagatcgaggtggagaagccctttgccatcgccaaggaggactacaaagacgatgacgacaagtaa

SEQ ID NO: 411 - DNA, 247 bp, synthetic construct
  source 1..247: mol_type = other DNA
taatacgactcactataggggtgggaccagcacgtcactgagtgaaggaggggagggaggctctggcagaacgaggaattctcttcttttttttctgcaggaagttgttcggaaggtggagagcaccaagacagacagccgggataaacccctgaaggatgtgatcatcgcagactgcggcaagatcgaggtggagaagccctttgccatcgccaaggaggactacaaagacgatgacgacaagtaa

SEQ ID NO: 412 - DNA, 247 bp, synthetic construct
  source 1..247: mol_type = other DNA
taatacgactcactataggttgtgcagccttcctggctgggctctgagggggctggaagaatttagaacaacgaggaattctcttcttttttttctgcaggaagttgttcggaaggtggagagcaccaagacagacagccgggataaacccctgaaggatgtgatcatcgcagactgcggcaagatcgaggtggagaagccctttgccatcgccaaggaggactacaaagacgatgacgacaagtaa

SEQ ID NO: 413 - DNA, 229 bp, synthetic construct
  source 1..229: mol_type = other DNA
gggtgggaccagcacgtcactgagtgaaggaggggagggaggctctggcagaacgaggaattctcttcttttttttctgcaggaagttgttcggaaggtggagagcaccaagacagacagccgggataaacccctgaaggatgtgatcatcgcagactgcggcaagatcgaggtggagaagccctttgccatcgccaaggaggactacaaagacgatgacgacaagtaa

SEQ ID NO: 414 - DNA, 297 bp, synthetic construct
  source 1..297: mol_type = other DNA
taatacgactcactataggggtgggaccagcacgtcactgagtgaaggaggggagggaggctctggcagttgtgcagccttcctggctgggctctgagggggctggaagaatttagaacaacgaggaattctcttcttttttttctgcaggaagttgttcggaaggtggagagcaccaagacagacagccgggataaacccctgaaggatgtgatcatcgcagactgcggcaagatcgaggtggagaagccctttgccatcgccaaggaggactacaaagacgatgacgacaagtaa

SEQ ID NO: 415 - DNA, 366 bp, synthetic construct
  source 1..366: mol_type = other DNA
acagaagtaaagaaagatttccttgggaacagaaaatataaagtttctgaggagaattcaaatgaagccaaaacctcaaaaaagatacatgcaggacctgcaggcagtatccccaagagaaggctccctgttggccaggtgcagtggctcacgcctgtaatgccagcactttgagaggctgagttgggaggatcacttgaaacgaggaattctcttcttttttttctgcaggacctcgagcagaaaatgaaagtggtagagaatctccaggatgactttgatttcaactataaaaccctcaagagtcaaggagactacaaagacgatgacgacaagtaagactacaaagacgatgacgacaagtaa

SEQ ID NO: 416 - DNA, 416 bp, synthetic construct
  source 1..416: mol_type = other DNA
ctgtttaaaataagcaaacaaaaaaacagaagtaaagaaagatttccttgggaacagaaaatataaagtttctgaggagaattcaaatgaagccaaaacctcaaaaaagatacatgcaggacctgcaggcagtatccccaagagaaggctccctgttggccaggtgcagtggctcacgcctgtaatgccagcactttgagaggctgagttgggaggatcacttgagcccaggagttcatgatcagcctggaacgaggaattctcttcttttttttctgcaggacctcgagcagaaaatgaaagtggtagagaatctccaggatgactttgatttcaactataaaaccctcaagagtcaaggagactacaaagacgatgacgacaagtaagactacaaagacgatgacgacaagtaa

SEQ ID NO: 417 - DNA, 366 bp, synthetic construct
  source 1..366: mol_type = other DNA
ggaacagaaaatataaagtttctgaggagaattcaaatgaagccaaaacctcaaaaaagatacatgcaggacctgcaggcagtatccccaagagaaggctccctgttggccaggtgcagtggctcacgcctgtaatgccagcactttgagaggctgagttgggaggatcacttgagcccaggagttcatgatcagcctggaacgaggaattctcttcttttttttctgcaggacctcgagcagaaaatgaaagtggtagagaatctccaggatgactttgatttcaactataaaaccctcaagagtcaaggagactacaaagacgatgacgacaagtaagactacaaagacgatgacgacaagtaa

SEQ ID NO: 418 - DNA, 416 bp, synthetic construct
  source 1..416: mol_type = other DNA
ggaacagaaaatataaagtttctgaggagaattcaaatgaagccaaaacctcaaaaaagatacatgcaggacctgcaggcagtatccccaagagaaggctccctgttggccaggtgcagtggctcacgcctgtaatgccagcactttgagaggctgagttgggaggatcacttgagcccaggagttcatgatcagcctggacaacacagggagacccccatctctacaaattttttttttttaattagctaacgaggaattctcttcttttttttctgcaggacctcgagcagaaaatgaaagtggtagagaatctccaggatgactttgatttcaactataaaaccctcaagagtcaaggagactacaaagacgatgacgacaagtaagactacaaagacgatgacgacaagtaa

SEQ ID NO: 419 - DNA, 466 bp, synthetic construct
  source 1..466: mol_type = other DNA
ggaacagaaaatataaagtttctgaggagaattcaaatgaagccaaaacctcaaaaaagatacatgcaggacctgcaggcagtatccccaagagaaggctccctgttggccaggtgcagtggctcacgcctgtaatgccagcactttgagaggctgagttgggaggatcacttgagcccaggagttcatgatcagcctggacaacacagggagacccccatctctacaaattttttttttttaattagctgggcgtggtggtgcatgcctgtggtcccggctacttgggaggatgaggtaaacgaggaattctcttcttttttttctgcaggacctcgagcagaaaatgaaagtggtagagaatctccaggatgactttgatttcaactataaaaccctcaagagtcaaggagactacaaagacgatgacgacaagtaagactacaaagacgatgacgacaagtaa

SEQ ID NO: 420 - DNA, 366 bp, synthetic construct
  source 1..366: mol_type = other DNA
ctgtttaaaataagcaaacaaaaaaacagaagtaaagaaagatttccttgggaacagaaaatataaagtttctgaggagaattcaaatgaagccaaaacctcaaaaaagatacatgcaggacctgcaggcagtatccccaagagaaggctccctgttggccaggtgcagtggctcacgcctgtaatgccagcactttgagaacgaggaattctcttcttttttttctgcaggacctcgagcagaaaatgaaagtggtagagaatctccaggatgactttgatttcaactataaaaccctcaagagtcaaggagactacaaagacgatgacgacaagtaagactacaaagacgatgacgacaagtaa

SEQ ID NO: 421 - DNA, 478 bp, synthetic construct
  source 1..478: mol_type = other DNA
atgtggcttctcagggacattgcgttcagctgcactctgtatacctcaggggtgggaccagcacgtcactgagtgaaggaggggagggaggctctggcagttgtgcagccttcctggctgggctctgagggggctggaagaatttagaaccttggaggcatggaggtacagggtttattctggacaggagcactgggctgcatctgtgggttgggtccttttgggaaagggatggacacatggagctcctgccctggggtctgtgttgaatccccggtgaggattgcccagtagtagcccaacgaggaattctcttcttttttttctgcaggaagttgttcggaaggtggagagcaccaagacagacagccgggataaacccctgaaggatgtgatcatcgcagactgcggcaagatcgaggtggagaagccctttgccatcgccaaggaggactacaaagacgatgacgacaagtaa

SEQ ID NO: 422 - DNA, 428 bp, synthetic construct
  source 1..428: mol_type = other DNA
atgtggcttctcagggacattgcgttcagctgcactctgtatacctcaggggtgggaccagcacgtcactgagtgaaggaggggagggaggctctggcagttgtgcagccttcctggctgggctctgagggggctggaagaatttagaaccttggaggcatggaggtacagggtttattctggacaggagcactgggctgcatctgtgggttgggtccttttgggaaagggatggacacatggagctcctaacgaggaattctcttcttttttttctgcaggaagttgttcggaaggtggagagcaccaagacagacagccgggataaacccctgaaggatgtgatcatcgcagactgcggcaagatcgaggtggagaagccctttgccatcgccaaggaggactacaaagacgatgacgacaagtaa

SEQ ID NO: 423 - DNA, 378 bp, synthetic construct
  source 1..378: mol_type = other DNA
atgtggcttctcagggacattgcgttcagctgcactctgtatacctcaggggtgggaccagcacgtcactgagtgaaggaggggagggaggctctggcagttgtgcagccttcctggctgggctctgagggggctggaagaatttagaaccttggaggcatggaggtacagggtttattctggacaggagcactgggctgaacgaggaattctcttcttttttttctgcaggaagttgttcggaaggtggagagcaccaagacagacagccgggataaacccctgaaggatgtgatcatcgcagactgcggcaagatcgaggtggagaagccctttgccatcgccaaggaggactacaaagacgatgacgacaagtaa

SEQ ID NO: 424 - DNA, 478 bp, synthetic construct
  source 1..478: mol_type = other DNA
cacacaaaactggaggcaccaaaattctaacagactcctggccagagcagggagaatgcagatttgacgagggggtacaggaattttgttcctttgaagtaagacccaggttgggccaagggtgaggaggaggaagagggtgaccagggcatgtggcttctcagggacattgcgttcagctgcactctgtatacctcaggggtgggaccagcacgtcactgagtgaaggaggggagggaggctctggcagttgtgcagccttcctggctgggctctgagggggctggaagaatttagaacaacgaggaattctcttcttttttttctgcaggaagttgttcggaaggtggagagcaccaagacagacagccgggataaacccctgaaggatgtgatcatcgcagactgcggcaagatcgaggtggagaagccctttgccatcgccaaggaggactacaaagacgatgacgacaagtaa

SEQ ID NO: 425 - DNA, 428 bp, synthetic construct
  source 1..428: mol_type = other DNA
ggagaatgcagatttgacgagggggtacaggaattttgttcctttgaagtaagacccaggttgggccaagggtgaggaggaggaagagggtgaccagggcatgtggcttctcagggacattgcgttcagctgcactctgtatacctcaggggtgggaccagcacgtcactgagtgaaggaggggagggaggctctggcagttgtgcagccttcctggctgggctctgagggggctggaagaatttagaacaacgaggaattctcttcttttttttctgcaggaagttgttcggaaggtggagagcaccaagacagacagccgggataaacccctgaaggatgtgatcatcgcagactgcggcaagatcgaggtggagaagccctttgccatcgccaaggaggactacaaagacgatgacgacaagtaa

SEQ ID NO: 426 - DNA, 378 bp, synthetic construct
  source 1..378: mol_type = other DNA
aagacccaggttgggccaagggtgaggaggaggaagagggtgaccagggcatgtggcttctcagggacattgcgttcagctgcactctgtatacctcaggggtgggaccagcacgtcactgagtgaaggaggggagggaggctctggcagttgtgcagccttcctggctgggctctgagggggctggaagaatttagaacaacgaggaattctcttcttttttttctgcaggaagttgttcggaaggtggagagcaccaagacagacagccgggataaacccctgaaggatgtgatcatcgcagactgcggcaagatcgaggtggagaagccctttgccatcgccaaggaggactacaaagacgatgacgacaagtaa

SEQ ID NO: 427 - DNA, 478 bp, synthetic construct
  source 1..478: mol_type = other DNA
tacaggaattttgttcctttgaagtaagacccaggttgggccaagggtgaggaggaggaagagggtgaccagggcatgtggcttctcagggacattgcgttcagctgcactctgtatacctcaggggtgggaccagcacgtcactgagtgaaggaggggagggaggctctggcagttgtgcagccttcctggctgggctctgagggggctggaagaatttagaaccttggaggcatggaggtacagggtttattctggacaggagcactgggctgcatctgtgggttgggtccttttgggaacgaggaattctcttcttttttttctgcaggaagttgttcggaaggtggagagcaccaagacagacagccgggataaacccctgaaggatgtgatcatcgcagactgcggcaagatcgaggtggagaagccctttgccatcgccaaggaggactacaaagacgatgacgacaagtaa

SEQ ID NO: 428 - DNA, 428 bp, synthetic construct
  source 1..428: mol_type = other DNA
aagacccaggttgggccaagggtgaggaggaggaagagggtgaccagggcatgtggcttctcagggacattgcgttcagctgcactctgtatacctcaggggtgggaccagcacgtcactgagtgaaggaggggagggaggctctggcagttgtgcagccttcctggctgggctctgagggggctggaagaatttagaaccttggaggcatggaggtacagggtttattctggacaggagcactgggctgaacgaggaattctcttcttttttttctgcaggaagttgttcggaaggtggagagcaccaagacagacagccgggataaacccctgaaggatgtgatcatcgcagactgcggcaagatcgaggtggagaagccctttgccatcgccaaggaggactacaaagacgatgacgacaagtaa

SEQ ID NO: 429 - DNA, 378 bp, synthetic construct
  source 1..378: mol_type = other DNA
ggaggaggaagagggtgaccagggcatgtggcttctcagggacattgcgttcagctgcactctgtatacctcaggggtgggaccagcacgtcactgagtgaaggaggggagggaggctctggcagttgtgcagccttcctggctgggctctgagggggctggaagaatttagaaccttggaggcatggaggtacagggttaacgaggaattctcttcttttttttctgcaggaagttgttcggaaggtggagagcaccaagacagacagccgggataaacccctgaaggatgtgatcatcgcagactgcggcaagatcgaggtggagaagccctttgccatcgccaaggaggactacaaagacgatgacgacaagtaa

SEQ ID NO: 430 - DNA, 304 bp, synthetic construct
  source 1..304: mol_type = other DNA
ggaacagaaaatataaagtttctgaggagaattcaaatgaagccaaaacctcaaaaaagatacatgcaggacctgcaggcagtatccccaagagaaggctccctgttggccaggtgcagtggctcacgcctgtaatgccagcactttgagaacgaggaattctcttcttttttttctgcaggacctcgagcagaaaatgaaagtggtagagaatctccaggatgactttgatttcaactataaaaccctcaagagtcaaggagactacaaagacgatgacgacaagtaagcaaggcggaggaag

SEQ ID NO: 431 - DNA, 318 bp, synthetic construct
  source 1..318: mol_type = other DNA
ggaacagaaaatataaagtttctgaggagaattcaaatgaagccaaaacctcaaaaaagatacatgcaggacctgcaggcagtatccccaagagaaggctccctgttggccaggtgcagtggctcacgcctgtaatgccagcactttgagaacgaggaattctcttcttttttttctgcaggacctcgagcagaaaatgaaagtggtagagaatctccaggatgactttgatttcaactataaaaccctcaagagtcaaggagactacaaagacgatgacgacaagtaagcaaggcggaggaagcaaggcggaggaag

SEQ ID NO: 432 - DNA, 334 bp, synthetic construct
  source 1..334: mol_type = other DNA
ggaacagaaaatataaagtttctgaggagaattcaaatgaagccaaaacctcaaaaaagatacatgcaggacctgcaggcagtatccccaagagaaggctccctgttggccaggtgcagtggctcacgcctgtaatgccagcactttgagaacgaggaattctcttcttttttttctgcaggacctcgagcagaaaatgaaagtggtagagaatctccaggatgactttgatttcaactataaaaccctcaagagtcaaggagactacaaagacgatgacgacaagtaagcaaggcggaggaaagcaaggcggaggaaggcaaggcggaggaag

SEQ ID NO: 433 - DNA, 350 bp, synthetic construct
  source 1..350: mol_type = other DNA
ggaacagaaaatataaagtttctgaggagaattcaaatgaagccaaaacctcaaaaaagatacatgcaggacctgcaggcagtatccccaagagaaggctccctgttggccaggtgcagtggctcacgcctgtaatgccagcactttgagaacgaggaattctcttcttttttttctgcaggacctcgagcagaaaatgaaagtggtagagaatctccaggatgactttgatttcaactataaaaccctcaagagtcaaggagactacaaagacgatgacgacaagtaagcaaggcggaggaaagcaaggcggaggaagagcaaggcggaggaaggcaaggcggaggaag

SEQ ID NO: 434 - DNA, 310 bp, synthetic construct
  source 1..310: mol_type = other DNA
ggaacagaaaatataaagtttctgaggagaattcaaatgaagccaaaacctcaaaaaagatacatgcaggacctgcaggcagtatccccaagagaaggctccctgttggccaggtgcagtggctcacgcctgtaatgccagcactttgagaacgaggaattctcttcttttttttctgcaggacctcgagcagaaaatgaaagtggtagagaatctccaggatgactttgatttcaactataaaaccctcaagagtcaaggagactacaaagacgatgacgacaagtaagcacacaggaccacacaggac

SEQ ID NO: 435 - DNA, 314 bp, synthetic construct
  source 1..314: mol_type = other DNA
ggaacagaaaatataaagtttctgaggagaattcaaatgaagccaaaacctcaaaaaagatacatgcaggacctgcaggcagtatccccaagagaaggctccctgttggccaggtgcagtggctcacgcctgtaatgccagcactttgagaacgaggaattctcttcttttttttctgcaggacctcgagcagaaaatgaaagtggtagagaatctccaggatgactttgatttcaactataaaaccctcaagagtcaaggagactacaaagacgatgacgacaagtaagaaaaagaaagaaaaaaagaaagaa

SEQ ID NO: 436 - DNA, 306 bp, synthetic construct
  source 1..306: mol_type = other DNA
ggaacagaaaatataaagtttctgaggagaattcaaatgaagccaaaacctcaaaaaagatacatgcaggacctgcaggcagtatccccaagagaaggctccctgttggccaggtgcagtggctcacgcctgtaatgccagcactttgagaacgaggaattctcttcttttttttctgcaggacctcgagcagaaaatgaaagtggtagagaatctccaggatgactttgatttcaactataaaaccctcaagagtcaaggagactacaaagacgatgacgacaagtaagtcagaggatcagagga

SEQ ID NO: 437 - DNA, 289 bp, synthetic construct
  source 1..289: mol_type = other DNA
gaggagcctagaaggcgccgggttggcaagtgggcagggaacagagacatgctttgtcgtgttctcagcggagctggggtaccttggtggtctcaggcgtgagacagggactgcctgaaggcagaggcaccaaaagctacaagagcaaacaacgaggaattctcttcttttttttctgcagtccctgttcgaacgccagggcctcccaggcccagagaagctgccgggctccttgcggaaggggattccacggaccaagtctgactacaaagacgatgacgacaagtaa

SEQ ID NO: 438 - DNA, 289 bp, synthetic construct
  source 1..289: mol_type = other DNA
gaggagcctagaaggcgccgggttggcaagtgggcagggaacagagacatgctttgtcgtgttctcagcggagctggggtaccttggtggtctcaggcgtgagacagggactgcctgaaggcagaggcaccaaaagctacaagagcaaacaacgactaactctcttcttttttttctgcagtccctgttcgaacgccagggcctcccaggcccagagaagctgccgggctccttgcggaaggggattccacggaccaagtctgactacaaagacgatgacgacaagtaa

SEQ ID NO: 439 - DNA, 289 bp, synthetic construct
  source 1..289: mol_type = other DNA
gaggagcctagaaggcgccgggttggcaagtgggcagggaacagagacatgctttgtcgtgttctcagcggagctggggtaccttggtggtctcaggcgtgagacagggactgcctgaaggcagaggcaccaaaagctacaagagcaaacaacgattaattctcttcttttttttctgcagtccctgttcgaacgccagggcctcccaggcccagagaagctgccgggctccttgcggaaggggattccacggaccaagtctgactacaaagacgatgacgacaagtaa

SEQ ID NO: 440 - DNA, 289 bp, synthetic construct
  source 1..289: mol_type = other DNA
gaggagcctagaaggcgccgggttggcaagtgggcagggaacagagacatgctttgtcgtgttctcagcggagctggggtaccttggtggtctcaggcgtgagacagggactgcctgaaggcagaggcaccaaaagctacaagagcaaacaacgattgactctcttcttttttttctgcagtccctgttcgaacgccagggcctcccaggcccagagaagctgccgggctccttgcggaaggggattccacggaccaagtctgactacaaagacgatgacgacaagtaa

SEQ ID NO: 441 - DNA, 289 bp, synthetic construct
  source 1..289: mol_type = other DNA
gaggagcctagaaggcgccgggttggcaagtgggcagggaacagagacatgctttgtcgtgttctcagcggagctggggtaccttggtggtctcaggcgtgagacagggactgcctgaaggcagaggcaccaaaagctacaagagcaaacaacgactcattctcttcttttttttctgcagtccctgttcgaacgccagggcctcccaggcccagagaagctgccgggctccttgcggaaggggattccacggaccaagtctgactacaaagacgatgacgacaagtaa

SEQ ID NO: 442 - DNA, 289 bp, synthetic construct
  source 1..289: mol_type = other DNA
gaggagcctagaaggcgccgggttggcaagtgggcagggaacagagacatgctttgtcgtgttctcagcggagctggggtaccttggtggtctcaggcgtgagacagggactgcctgaaggcagaggcaccaaaagctacaagagcaaacaacgatttattctcttcttttttttctgcagtccctgttcgaacgccagggcctcccaggcccagagaagctgccgggctccttgcggaaggggattccacggaccaagtctgactacaaagacgatgacgacaagtaa

SEQ ID NO: 443 - DNA, 289 bp, synthetic construct
  source 1..289: mol_type = other DNA
gaggagcctagaaggcgccgggttggcaagtgggcagggaacagagacatgctttgtcgtgttctcagcggagctggggtaccttggtggtctcaggcgtgagacagggactgcctgaaggcagaggcaccaaaagctacaagagcaaacaactactaactctcttcttttttttctgcagtccctgttcgaacgccagggcctcccaggcccagagaagctgccgggctccttgcggaaggggattccacggaccaagtctgactacaaagacgatgacgacaagtaa

SEQ ID NO: 444 - DNA, 304 bp, synthetic construct
  source 1..304: mol_type = other DNA
gaggagcctagaaggcgccgggttggcaagtgggcagggaacagagacatgctttgtcgtgttctcagcggagctggggtaccttggtggtctcaggcgtgagacagggactgcctgaaggcagaggcaccaaaagctacaagagcaaacaacgaggaattctcttcttttttttctgcagtccctgttcgaacgccagggcctcccaggcccagagaagctgccgggctccttgcggaaggggattccacggaccaagtctgactacaaagacgatgacgacaagtaagcaaggcggaggaag

SEQ ID NO: 445 - DNA, 318 bp, synthetic construct
  source 1..318: mol_type = other DNA
gaggagcctagaaggcgccgggttggcaagtgggcagggaacagagacatgctttgtcgtgttctcagcggagctggggtaccttggtggtctcaggcgtgagacagggactgcctgaaggcagaggcaccaaaagctacaagagcaaacaacgaggaattctcttcttttttttctgcagtccctgttcgaacgccagggcctcccaggcccagagaagctgccgggctccttgcggaaggggattccacggaccaagtctgactacaaagacgatgacgacaagtaagcaaggcggaggaagcaaggcggaggaag

SEQ ID NO: 446 - DNA, 334 bp, synthetic construct
  source 1..334: mol_type = other DNA
gaggagcctagaaggcgccgggttggcaagtgggcagggaacagagacatgctttgtcgtgttctcagcggagctggggtaccttggtggtctcaggcgtgagacagggactgcctgaaggcagaggcaccaaaagctacaagagcaaacaacgaggaattctcttcttttttttctgcagtccctgttcgaacgccagggcctcccaggcccagagaagctgccgggctccttgcggaaggggattccacggaccaagtctgactacaaagacgatgacgacaagtaagcaaggcggaggaaagcaaggcggaggaaggcaaggcggaggaag

SEQ ID NO: 447 - DNA, 350 bp, synthetic construct
  source 1..350: mol_type = other DNA
gaggagcctagaaggcgccgggttggcaagtgggcagggaacagagacatgctttgtcgtgttctcagcggagctggggtaccttggtggtctcaggcgtgagacagggactgcctgaaggcagaggcaccaaaagctacaagagcaaacaacgaggaattctcttcttttttttctgcagtccctgttcgaacgccagggcctcccaggcccagagaagctgccgggctccttgcggaaggggattccacggaccaagtctgactacaaagacgatgacgacaagtaagcaaggcggaggaaagcaaggcggaggaagagcaaggcggaggaaggcaaggcggaggaag

SEQ ID NO: 448 - DNA, 310 bp, synthetic construct
  source 1..310: mol_type = other DNA
gaggagcctagaaggcgccgggttggcaagtgggcagggaacagagacatgctttgtcgtgttctcagcggagctggggtaccttggtggtctcaggcgtgagacagggactgcctgaaggcagaggcaccaaaagctacaagagcaaacaacgaggaattctcttcttttttttctgcagtccctgttcgaacgccagggcctcccaggcccagagaagctgccgggctccttgcggaaggggattccacggaccaagtctgactacaaagacgatgacgacaagtaagcacacaggaccacacaggac

SEQ ID NO: 449 - DNA, 331 bp, synthetic construct
  source 1..331: mol_type = other DNA
gaggagcctagaaggcgccgggttggcaagtgggcagggaacagagacatgctttgtcgtgttctcagcggagctggggtaccttggtggtctcaggcgtgagacagggactgcctgaaggcagaggcaccaaaagctacaagagcaaacaacgaggaattctcttcttttttttctgcagtccctgttcgaacgccagggcctcccaggcccagagaagctgccgggctccttgcggaaggggattccacggaccaagtctgactacaaagacgatgacgacaagtaagcacacaggaccacacaggacgcacacaggaccacacaggac

SEQ ID NO: 450 - DNA, 314 bp, synthetic construct
  source 1..314: mol_type = other DNA
gaggagcctagaaggcgccgggttggcaagtgggcagggaacagagacatgctttgtcgtgttctcagcggagctggggtaccttggtggtctcaggcgtgagacagggactgcctgaaggcagaggcaccaaaagctacaagagcaaacaacgaggaattctcttcttttttttctgcagtccctgttcgaacgccagggcctcccaggcccagagaagctgccgggctccttgcggaaggggattccacggaccaagtctgactacaaagacgatgacgacaagtaagaaaaagaaagaaaaaaagaaagaa

SEQ ID NO: 451 - DNA, 306 bp, synthetic construct
  source 1..306: mol_type = other DNA
gaggagcctagaaggcgccgggttggcaagtgggcagggaacagagacatgctttgtcgtgttctcagcggagctggggtaccttggtggtctcaggcgtgagacagggactgcctgaaggcagaggcaccaaaagctacaagagcaaacaacgaggaattctcttcttttttttctgcagtccctgttcgaacgccagggcctcccaggcccagagaagctgccgggctccttgcggaaggggattccacggaccaagtctgactacaaagacgatgacgacaagtaagtcagaggatcagagga

SEQ ID NO: 452 - DNA, 323 bp, synthetic construct
  source 1..323: mol_type = other DNA
gaggagcctagaaggcgccgggttggcaagtgggcagggaacagagacatgctttgtcgtgttctcagcggagctggggtaccttggtggtctcaggcgtgagacagggactgcctgaaggcagaggcaccaaaagctacaagagcaaacaacgaggaattctcttcttttttttctgcagtccctgttcgaacgccagggcctcccaggcccagagaagctgccgggctccttgcggaaggggattccacggaccaagtctgactacaaagacgatgacgacaagtaagtcagaggatcagaggagtcagaggatcagagga

SEQ ID NO: 453 - DNA, 511 bp, synthetic construct
  source 1..511: mol_type = other DNA
tcacactttggacctcattttcatctaaggaaggtggtataatatctcccagggatacaggaacctcagggagagataagactactgtcatgtgtgcccctctctctaccatttctggaaacaataccaggaggcagaattcaggcatccaacgactaactctcttcttttttttctgcagagcaagggagggattctatccaaagcttgtgattatatccaggagcttcggcagagtaaccaccgcttgtctgaagaactgcagggacttgaccaactgcagctggacaatgacgtgctccgtcagcaggtaagtttgggctgcatgactgcatggttgcatgaacacatattaatttccgtagtaaagctggcacttccaagcccctgaatgtattcagacatccactggtgagggggaaaagatgaagccttctccatggagaacaaagtagagggtgtcaaactgggtcagtggctagcagaactgagaagggctgcactgggggta

SEQ ID NO: 454 - DNA, 511 bp, synthetic construct
  source 1..511: mol_type = other DNA
ttgaccaagtggagggtgctcttccagctcttgaacaggacctagagagttggatgtattagatgggcgtacgcagtatgtgcccagttgtatgattgtgcgttttcaaggaagggagtgtgcgtcgattcgttcagtatcgacagggggaacgactaactctcttcttttttttctgcagagcaagggagggattctatccaaagcttgtgattatatccaggagcttcggcagagtaaccaccgcttgtctgaagaactgcagggacttgaccaactgcagctggacaatgacgtgctccgtcagcaggtaagtttgggctgcatgactgcatggttgcatgaacacatattaatttccgtagtaaagctggcacttccaagcccctgaatgtattcagacatccactggtgagggggaaaagatgaagccttctccatggagaacaaagtagagggtgtcaaactgggtcagtggctagcagaactgagaagggctgcactgggggta

SEQ ID NO: 455 - DNA, 511 bp, synthetic construct
  source 1..511: mol_type = other DNA
tcacactttggacctcattttcatctaaggaaggtggtataatatctcccagggatacaggaacctcagggagagataagactactgtcatgtgtgcccctctctctaccatttctggaaacaataccaggaggcagaattcaggcatccaacgactaactctcttcttttttttctgcagagcaagggagggattctatccaaagcttgtgattatatccaggagcttcggcagagtaaccaccgcttgtctgaagaactgcagggacttgaccaactgcagctggacaatgacgtgctccgtcagcaggtaagtttgggctgcatgactgcatggttgcatgaacacatattaatttccttgaccaagtggagggtgctcttccagctcttgaacaggacctagagagttggatgtattagatgggcgtacgcagtatgtgcccagttgtatgattgtgcgttttcaaggaagggagtgtgcgtcgattcgttcagtatcgacaggggg

SEQ ID NO: 456 - DNA, 511 bp, synthetic construct
  source 1..511: mol_type = other DNA
ttgaccaagtggagggtgctcttccagctcttgaacaggacctagagagttggatgtattagatgggcgtacgcagtatgtgcccagttgtatgattgtgcgttttcaaggaagggagtgtgcgtcgattcgttcagtatcgacagggggaacgactaactctcttcttttttttctgcagagcaagggagggattctatccaaagcttgtgattatatccaggagcttcggcagagtaaccaccgcttgtctgaagaactgcagggacttgaccaactgcagctggacaatgacgtgctccgtcagcaggtaagtttgggctgcatgactgcatggttgcatgaacacatattaatttccctattcagggattgactgataccggaagacatctcagttgaagtggtctatacgacagagaccgtgcacctaccaaatctccttagtgtaagttcagaccaattggtagtttgtccagaactcagattttaacagcagaggacgcatgct

SEQ ID NO: 457 - DNA, 235 bp, synthetic construct
  source 1..235: mol_type = other DNA
gcccggctgtggctgaggagcccctccaccgaccgtaagtttgggctgcatgactgcatggttgcatgaacacatattaatttccatatgtgttgaattacccactccacttagttctacacctcattcattcattcagtgagtgtttctcgactactatgaataaaccgttatactccatgttgcgggcagaatggggatctggacagggaagcacagggcacgagttcaccaa

SEQ ID NO: 458 - DNA, 224 bp, synthetic construct
  source 1..224: mol_type = other DNA
gcccggctgtggctgaggagcccctccaccgaccgtaagtttgggctgcatgactgcatggttgcatgaacacaatatgtgttgaattacccactccacttagttctacacctcattcattcattcagtgagtgtttctcgactactatgaataaaccgttatactccatgttgcgggcagaatggggatctggacagggaagcacagggcacgagttcaccaa

SEQ ID NO: 459 - DNA, 224 bp, synthetic construct
  source 1..224: mol_type = other DNA
gcccggctgtggctgaggagcccctccaccgaccgtaagtttgggctgcatgactgcatggttgcatgaacacatccacttagttctacacctcattcattcattcagtgagtgtttctcgactactatgaataaaccgttatactccatgttgcgggcagaatggggatctggacagggaagcacagggcacgagttcaccaatggctgtcaagctacgctgc

SEQ ID NO: 460 - DNA, 251 bp, synthetic construct
  source 1..251: mol_type = other DNA
gcccggctgtggctgaggagcccctccaccgaccgtaagtttgggctgcatgactgcatggttgcatgaacacatattaatttccttcttttttttattttaaaataaaaaaaagaaggaaattaatatgtgttgaattacccactccacttagttctacacctcattcattcattcagtgagtgtttctcgactactatgaataaaccgttatactccatgttgcgggcagaatggggatctggacaggg

SEQ ID NO: 461 - DNA, 213 bp, synthetic construct
  source 1..213: mol_type = other DNA
gcccggctgtggctgaggagcccctccaccgaccgtaagtttgggcaacacatattaatttccatatgtgttgaattacccactccacttagttctacacctcattcattcattcagtgagtgtttctcgactactatgaataaaccgttatactccatgttgcgggcagaatggggatctggacagggaagcacagggcacgagttcaccaa

SEQ ID NO: 462 - DNA, 185 bp, synthetic construct
  source 1..185: mol_type = other DNA
gcccggctgtggctgaggagcccctccaccgaccgtaagtttgggctgcatgactgcatggttgcatgaacacatattaatttccatatgtgttgaattacccactccacttagttctacacctcattcattcattcagtgagtgtttctcgactactatgaataaaccgttatactccatgttg

SEQ ID NO: 463 - DNA, 401 bp, synthetic construct
  source 1..401: mol_type = other DNA
gcccggctgtggctgaggagcccctccaccgaccgtaagtttggatacttacctggcaggggagataccatgatcacgaaggtggttttcccagggcgaggcttatccattgcactccggatgtgctgacccctgcgatttccccaaatgtgggaaactcgactgcataatttgtggtagtgggggactgcgttcgcgctttcccctggccatgcatgactgcatggttgcatgaacacatattaatttccatatgtgttgaattacccactccacttagttctacacctcattcattcattcagtgagtgtttctcgactactatgaataaaccgttatactccatgttgcgggcagaatggggatctggacagggaagcacagggcacgagttcaccaa

SEQ ID NO: 464 - DNA, 279 bp, synthetic construct
  source 1..279: mol_type = other DNA
gcccggctgtggctgaggagcccctccaccgaccgtaagtttggataatttgtggtagtgggggactgcgttcgcgctttcccctggccatgcatgactgcatggttgcatgaacacatattaatttccatatgtgttgaattacccactccacttagttctacacctcattcattcattcagtgagtgtttctcgactactatgaataaaccgttatactccatgttgcgggcagaatggggatctggacagggaagcacagggcacgagttcaccaa

SEQ ID NO: 465 - protein, 1529 aa, synthetic construct
MTTTMKISIEFLEPFRMTKWQESTRRNKNNKEFVRGQAFARWHRNKKDNTKGRPYITGTLLRSAVIRSAENLLTLSDGKISEKTCCPGKFDTEDKDRLLQLRQRSTLRWTDKNPCPDNAETYCPFCELLGRSGNDGKKAEKKDWRFRIHFGNLSLPGKPDFDGPKAIGSQRVLNRVDFKSGKAHDFFKAYEVDHTRFPRFEGEITIDNKVSAEARKLLCDSLKFTDRLCGALCVIRFDEYTPAADSGKQTENVQAEPNANLAEKTAEQIISILDDNKKTEYTRLLADAIRSLRRSSKLVAGLPKDHDGKDDHYLWDIGKKKKDENSVTIRQILTTSADTKELKNAGKWREFCEKLGEALYLKSKDMSGGLKITRRILGDAEFHGKPDRLEKSRSVSIGSVLKETVVCGELVAKTPFFFGAIDEDAKQTDLQVLLTPDNKYRLPRSAVRGILRRDLQTYFDSPCNAELGGRPCMCKTCRIMRGITVMDARSEYNAPPEIRHRTRINPFTGTVAEGALFNMEVAPEGIVFPFQLRYRGSEDGLPDALKTVLKWWAEGQAFMSGAASTGKGRFRMENAKYETLDLSDENQRNDYLKNWGWRDEKGLEELKKRLNSGLPEPGNYRDPKWHEINVSIEMASPFINGDPIRAAVDKRGTDVVTFVKYKAEGEEAKPVCAYKAESFRGVIRSAVARIHMEDGVPLTELTHSDCECLLCQIFGSEYEAGKIRFEDLVFESDPEPVTFDHVAIDRFTGGAADKKKFDDSPLPGSPARPLMLKGSFWIRRDVLEDEEYCKALGKALADVNNGLYPLGGKSAIGYGQVKSLGIKGDDKRISRLMNPAFDETDVAVPEKPKTDAEVRIEAEKVYYPHYFVEPHKKVEREEKPCGHQKFHEGRLTGKIRCKLITKTPLIVPDTSNDDFFRPADKEARKEKDEYHKSYAFFRLHKQIMIPGSELRGMVSSVYETVTNSCFRIFDETKRLSWRMDADHQNVLQDFLPGRVTADGKHIQKFSETARVPFYDKTQKHFDILDEQEIAGEKPVRMWVKRFIKRGGGSRDSRYQKAFQEIPENDPDGWECKEGYLHVVGPSKVEFSDKKGDVINNFQGTLPSVPNDWKTIRTNDFKNRKRKNEPVFCCEDDKGNYYTMAKYCETFFFDLKENEEYEIPEKARIKYKELLRVYNNNPQAVPESVFQSRVARENVEKLKSGDLVYFKHNEKYVEDIVPVRISRTVDDRMIGKRMSADLRPCHGDWVEDGDLSALNAYPEKRLLLRHPKGLCPACRLFGTGSYKGRVRFGFASLENDPEWLIPGKNPGDPFHGGPVMLSLLERPRPTWSIPGSDNKFKVPGRKFYVHHHAWKTIKDGNHPTTGKAIEQSPNNRTVEALAGGNSFSFEIAFENLKEWELGLLIHSLQLEKGLAHKLGMAKSMGFGSVEIDVESVRLRKDWKQWRNGNSEIPNWLGKGFAKLKEWFRDELDFIENLKKLLWFPEGDQAPRVCYPMLRKKDDPNGNSGYEELKDGEFKKEDRQKKLTTPWTPWA

SEQ ID NO: 466 - protein, 1354 aa, synthetic construct
MKRTADGSEFESPKKKRKVTTTMKISIEFLEPFRMTKWQESTRRNKNNKEFVRGQAFARWHRNKKDNTKGRPYITGTLLRSAVIRSAENLLTLSDGKISEKTCCPGKFDTEDKDRLLQLRQRSTLRWTDKNPCPDNAETYCPFCELLGRSGNDGKKAEKKDWRFRIHFGNLSLPGKPDFDGPKAIGSQRVLNRVDFKSGKAHDFFKAYEVDHTRFPRFEGEITIDNKVSAEARKLLCDSLKFTDRLCGALCVIRFDEYTPAADSGKQTENVQAEPNANLAEKTAEQIISILDDNKKTEYTRLLADAIRSLRRSSKLVAGLPKDHDGKDDHYLWDIGKKKKDENSVTIRQILTTSADTKELKNAGKWREFCEKLGEALYLKSKDMSGGLKITRRILGDAEFHGKPDRLEKSRSVSIGSVLKETVVCGELVAKTPFFFGAIDEDAKQTDLQVLLTPDNKYRLPRSAVRGILRRDLQTYFDSPCNAELGGRPCMCKTCRIMRGITVMDARSEYNAPPEIRHRTRINPFTGTVAEGALFNMEVAPEGIVFPFQLRYRGSEDGLPDALKTVLKWWAEGQAFMSGAASTGKGRFRMENAKYETLDLSDENQRNDYLKNWGWRDEKGLEELKKRLNSGLPEPGNYRDPKWHEINVSIEMASPFINGDPIRAAVDKRGTDVVTFVKYKAEGEEAKPVCAYKAESFRGVIRSAVARIHMEDGVPLTELTHSDCECLLCQIFGSEYEAGKIRFEDLVFESDPEPVTFDHVAIDRFTGGAADKKKFDDSPLPGSPARPLMLKGSFWIRRDVLEDEEYCKALGKALADVNNGLYPLGGKSAIGYGQVKSLGIKGDDKRISRLMNPAFDETDVAVPEKPKTDAEVRIEAEKVYYPHYFVEPHKKVEREEKPCGHQKFHEGRLTGKIRCKLITKTPLIVPDTSNDDFFRPADKEARKEKDEYHKSYAFFRLHKQIMIPGSELRGMVSSVYETVTNSCFRIFDETKRLSWRMDADHQNVLQDFLPGRVTADGKHIQKFSGGGSRTVDDRMIGKRMSADLRPCHGDWVEDGDLSALNAYPEKRLLLRHPKGLCPACRLFGTGSYKGRVRFGFASLENDPEWLIPGKNPGDPFHGGPVMLSLLERPRPTWSIPGSDNKFKVPGRKFYVHHHAWKTIKDGNHPTTGKAIEQSPNNRTVEALAGGNSFSFEIAFENLKEWELGLLIHSLQLEKGLAHKLGMAKSMGFGSVEIDVESVRLRKDWKQWRNGNSEIPNWLGKGFAKLKEWFRDELDFIENLKKLLWFPEGDQAPRVCYPMLRKKDDPNGNSGYEELKDGEFKKEDRQKKLTTPWTPWAKRTADGSEFESPKKKRKV

SEQ ID NO: 467 - protein, 1326 aa, synthetic construct
MKRTADGSEFESPKKKRKVTTTMKISIEFLEPFRMTKWQESTRRNKNNKEFVRGQAFARWHRNKKDNTKGRPYITGTLLRSAVIRSAENLLTLSDGKISEKTCCPGKFDTEDKDRLLQLRQRSTLRWTDKNPCPDNAETYCPFCELLGRSGNDGKKAEKKDWRFRIHFGNLSLPGKPDFDGPKAIGSQRVLNRVDFKSGKAHDFFKAYEVDHTRFPRFEGEITIDNKVSAEARKLLCDSLKFTDRLCGALCVIRFDEYTPAADSGKQTENVQAEPNANLAEKTAEQIISILDDNKKTEYTRLLADAIRSLRRSSKLVAGLPKDHDGKDDHYLWDIGKKKKDENSVTIRQILTTSADTKELKNAGKWREFCEKLGEALYLKSKDMSGGLKITRRILGDAEFHGKPDRLEKSRSVSIGSVLKETVVCGELVAKTPFFFGAIDEDAKQTDLQVLLTPDNKYRLPRSAVRGILRRDLQTYFDSPCNAELGGRPCMCKTCRIMRGITVMDARSEYNAPPEIRHRTRINPFTGTVAEGALFNMEVAPEGIVFPFQLRYRGSEDGLPDALKTVLKWWAEGQAFMSGAASTGKGRFRMENAKYETLDLSDENQRNDYLKNWGWRDEKGLEELKKRLNSGLPEPGNYRDPKWHEINVSIEMASPFINGDPIRAAVDKRGTDVVTFVKYKAEGEEAKPVCAYKAESFRGVIRSAVARIHMEDGVPLTELTHSDCECLLCQIFGSEYEAGKIRFEDLVFESDPEPVTFDHVAIDRFTGGAADKKKFDDSPLPGSPARPLMLKGSFWIRRDVLEDEEYCKALGKALADVNNGLYPLGGKSAIGYGQVKSLGIKGDDKRISRLMNPAFDETDVAVPEKPKTDAEVRIEAEKVYYPHYFVEPHKKVEREEKPCGHQKFHEGRLTGKIRCKLITKTPLIVPDTSNDDFFRPADKEARKEKDEYHKSYAFFRLHKQIMIPGSELRGMVSSVYETVTNSCFRIFDETKRLSWRGGGSRTVDDRMIGKRMSADLRPCHGDWVEDGDLSALNAYPEKRLLLRHPKGLCPACRLFGTGSYKGRVRFGFASLENDPEWLIPGKNPGDPFHGGPVMLSLLERPRPTWSIPGSDNKFKVPGRKFYVHHHAWKTIKDGNHPTTGKAIEQSPNNRTVEALAGGNSFSFEIAFENLKEWELGLLIHSLQLEKGLAHKLGMAKSMGFGSVEIDVESVRLRKDWKQWRNGNSEIPNWLGKGFAKLKEWFRDELDFIENLKKLLWFPEGDQAPRVCYPMLRKKDDPNGNSGYEELKDGEFKKEDRQKKLTTPWTPWAKRTADGSEFESPKKKRKV

SEQ ID NO: 468 - protein, 1637 aa, synthetic construct
MKRTADGSEFESPKKKRKVTTTMKISIEFLEPFRMTKWQESTRRNKNNKEFVRGQAFARWHRNKKDNTKGRPYITGTLLRSAVIRSAENLLTLSDGKISEKTCCPGKFDTEDKDRLLQLRQRSTLRWTDKNPCPDNAETYCPFCELLGRSGNDGKKAEKKDWRFRIHFGNLSLPGKPDFDGPKAIGSQRVLNRVDFKSGKAHDFFKAYEVDHTRFPRFEGEITIDNKVSAEARKLLCDSLKFTDRLCGALCVIRFDEYTPAADSGKQTENVQAEPNANLAEKTAEQIISILDDNKKTEYTRLLADAIRSLRRSSKLVAGLPKDHDGKDDHYLWDIGKKKKDENSVTIRQILTTSADTKELKNAGKWREFCEKLGEALYLKSKDMSGGLKITRRILGDAEFHGKPDRLEKSRSVSIGSVLKETVVCGELVAKTPFFFGAIDEDAKQTALQVLLTPDNKYRLPRSAVRGILRRDLQTYFDSPCNAELGGRPCMCKTCRIMRGITVMDARSEYNAPPEIRHRTRINPFTGTVAEGALFNMEVAPEGIVFPFQLRYRGSEDGLPDALKTVLKWWAEGQAFMSGAASTGKGRFRMENAKYETLDLSDENQRNDYLKNWGWRDEKGLEELKKRLNSGLPEPGNYRDPKWHEINVSIEMASPFINGDPIRAAVDKRGTAVVTFVKYKAEGEEAKPVCAYKAESFRGVIRSAVARIHMEDGVPLTELTHSDCECLLCQIFGSEYEAGKIRFEDLVFESDPEPVTFDHVAIDRFTGGAADKKKFDDSPLPGSPARPLMLKGSFWIRRDVLEDEEYCKALGKALADVNNGLYPLGGKSAIGYGQVKSLGIKGDDKRISRLMNPAFDETDVAVPEKPKTDAEVRIEAEKVYYPHYFVEPHKKVEREEKPCGHQKFHEGRLTGKIRCKLITKTPLIVPDTSNDDFFRPADKEARKEKDEYHKSYAFFRLHKQIMIPGSELRGMVSSVYETVTNSCFRIFDETKRLSWRMDADHQNVLQDFLPGRVTADGKHIQKFSETARVPFYDKTQKHFDILDEQEIAGEKPVRMWVKRFIKRLSLVDPAKHPQKKQDNKWKRRKEGIATFIEQKNGSYYFNVVTNNGCTSFHLWHKPDNFDQEKLEGIQNGEKLDCWVRDSRYQKAFQEIPENDPDGWECKEGYLHVVGPSKVEFSDKKGDVINNFQGTLPSVPNDWKTIRTNDFKNRKRKNEPVFCCEDDKGNYYTMAKYCETFFFDLKENEEYEIPEKARIKYKELLRVYNNNPQAVPESVFQSRVARENVEKLKSGDLVYFKHNEKYVEDIVPVRISRTVDDRMIGKRMSADLRPCHGDWVEDGDLSALNAYPEKRLLLRHPKGLCPACRLFGTGSYKGRVRFGFASLENDPEWLIPGKNPGDPFHGGPVMLSLLERPRPTWSIPGSDNKFKVPGRKFYVHHHAWKTIKDGNHPTTGKAIEQSPNNRTVEALAGGNSFSFEIAFENLKEWELGLLIHSLQLEKGLAHKLGMAKSMGFGSVEIDVESVRLRKDWKQWRNGNSEIPNWLGKGFAKLKEWFRDELDFIENLKKLLWFPEGDQAPRVCYPMLRKKDDPNGNSGYEELKDGEFKKEDRQKKLTTPWTPWAKRTADGSEFESPKKKRKV

SEQ ID NO: 469 - protein, 1458 aa, synthetic construct
MKVTKVDGISHKKYIEEGKLVKSTSEENRTSERLSELLSIRLDIYIKNPDNASEEENRIRRENLKKFFSNKVLHLKDSVLYLKNRKEKNAVQDKNYSEEDISEYDLKNKNSFSVLKKILLNEDVNSEELEIFRKDVEAKLNKINSLKYSFEENKANYQKINENNVEKVGGKSKRNIIYDYYRESAKRNDYINNVQEAFDKLYKKEDIEKLFFLIENSKKHEKYKIREYYHKIIGRKNDKENFAKIIYEEIQNVNNIKELIEKIPDMSELKKSQVFYKYYLDKEELNDKNIKYAFCHFVEIEMSQLLKNYVYKRLSNISNDKIKRIFEYQNLKKLIENKLLNKLDTYVRNCGKYNYYLQVGEIATSDFIARNRQNEAFLRNIIGVSSVAYFSLRNILETENENGITGRMRGKTVKNNKGEEKYVSGEVDKIYNENKQNEVKENLKMFYSYDFNMDNKNEIEDFFANIDEAISSIRHGIVHFNLELEGKDIFAFKNIAPSEISKKMFQNEINEKKLKLKIFKQLNSANVFNYYEKDVIIKYLKNTKFNFVNKNIPFVPSFTKLYNKIEDLRNTLKFFWSVPKDKEEKDAQIYLLKNIYYGEFLNKFVKNSKVFFKITNEVIKINKQRNQKTGHYKYQKFENIEKTVPVEYLAIIQSREMINNQDKEEKNTYIDFIQQIFLKGFIDYLNKNNLKYIESNNNNDNNDIFSKIKIKKDNKEKYDKILKNYEKHNRNKEIPHEINEFVREIKLGKILKYTENLNMFYLILKLLNHKELTNLKGSLEKYQSANKEETFSDELELINLLNLDNNRVTEDFELEANEIGKFLDFNENKIKDRKELKKFDTNKIYFDGENIIKHRAFYNIKKYGMLNLLEKIADKAKYKISLKELKEYSNKKNEIEKNYTMQQNLHRKYARPKKDEKFNDEDYKEYEKAIGNIQKYTHLKNKVEFNELNLLQGLLLKILHRLVGYTSIWERDLRFRLKGEFPENHYIEEIFNFDNSKNVKYKSGQIVEKYINFYKELYKDNVEKRSIYSDKKVKKLKQEKKDLYIRNYIAHFNYIPHAEISLLEVLENLRKLLSYDRKLKNAIMKSIVDILKEYGFVATFKIGADKKIEIQTLESEKIVHLKNLKKKKLMTDRNSEELCELVKVMFEYKALEGGGGSGGGGSGGGGSVSKGEELFTGVVPILVELDGDVNGHKFSVRGEGEGDATNGKLTLKFICTTGKLPVPWPTLVTTLTYGVQCFSRYPDHMKQHDFFKSAMPEGYVQERTISFKDDGTYKTRAEVKFEGDTLVNRIELKGIDFKEDGNILGHKLEYNFNSHNVYITADKQKNGIKANFKIRHNVEDGSVQLADHYQQNTPIGDGPVLLPDNHYLSTQSKLSKDPNEKRDHMVLLEFVTAAGITLGMDELYKGSEGAPKKKRKVGSSYPYDVPDYAYPYDVPDYAYPYDVPDYAKRTADGSEFES

SEQ ID NO: 470 - protein, 1133 aa, synthetic construct
MNIPALVENQKKYFGTYSVMAMLNAQTVLDHIQKVADIEGEQNENNENLWFHPVMSHLYNAKNGYDKQPEKTMFIIERLQSYFPFLKIMAENQREYSNGKYKQNRVEVNSNDIFEVLKRAFGVLKMYRDLTNHYKTYEEKLNDGCEFLTSTEQPLSGMINNYYTVALRNMNERYGYKTEDLAFIQDKRFKFVKDAYGKKKSQVNTGFFLSLQDYNGDTQKKLHLSGVGIALLICLFLDKQYINIFLSRLPIFSSYNAQSEERRIIIRSFGINSIKLPKDRIHSEKSNKSVAMDMLNEVKRCPDELFTTLSAEKQSRFRIISDDHNEVLMKRSSDRFVPLLLQYIDYGKLFDHIRFHVNMGKLRYLLKADKTCIDGQTRVRVIEQPLNGFGRLEEAETMRKQENGTFGNSGIRIRDFENMKRDDANPANYPYIVDTYTHYILENNKVEMFINDKEDSAPLLPVIEDDRYVVKTIPSCRMSTLEIPAMAFHMFLFGSKKTEKLIVDVHNRYKRLFQAMQKEEVTAENIASFGIAESDLPQKILDLISGNAHGKDVDAFIRLTVDDMLTDTERRIKRFKDDRKSIRSADNKMGKRGFKQISTGKLADFLAKDIVLFQPSVNDGENKITGLNYRIMQSAIAVYDSGDDYEAKQQFKLMFEKARLIGKGTTEPHPFLYKVFARSIPANAVEFYERYLIERKFYLTGLSNEIKKGNRVDVPFIRRDQNKWKTPAMKTLGRIYSEDLPVELPRQMFDNEIKSHLKSLPQMEGIDFNNANVTYLIAEYMKRVLDDDFQTFYQWNRNYRYMDMLKGEYDRKGSLQHCFTSVEEREGLWKERASRTERYRKQASNKIRSNRQMRNASSEEIETILDKRLSNSRNEYQKSEKVIRRYRVQDALLFLLAKKTLTELADFDGERFKLKEIMPDAEKGILSEIMPMSFTFEKGGKKYTITSEGMKLKNYGDFFVLASDKRIGNLLELVGSDIVSKEDIMEEFNKYDQCRPEISSIVFNLEKWAFDTYPELSARVDREEKVDFKSILKILLNNKNINKEQSDILRKIRNAFDHNNYPDKGVVEIKALPEIAMSIKKAFGEYAIMKGSLQLPPLERLTLGSSYPYDVPDYAYPYDVPDYAYPYDVPDYA

SEQ ID NO: 471 - protein, 1016 aa, synthetic construct
MSPKKKRKVEASIEKKKSFAKGMGVKSTLVSGSKVYMTTFAEGSDARLEKIVEGDSIRSVNEGEAFSAEMADKNAGYKIGNAKFSHPKGYAVVANNPLYTGPVQQDMLGLKETLEKRYFGESADGNDNICIQVIHNILDIEKILAEYITNAAYAVNNISGLDKDIIGFGKFSTVYTYDEFKDPEHHRAAFNNNDKLINAIKAQYDEFDNFLDNPRLGYFGQAFFSKEGRNYIINYGNECYDILALLSGLRHWVVHNNEEESRISRTWLYNLDKNLDNEYISTLNYLYDRITNELTNSFSKNSAANVNYIAETLGINPAEFAEQYFRFSIMKEQKNLGFNITKLREVMLDRKDMSEIRKNHKVFDSIRTKVYTMMDFVIYRYYIEEDAKVAAANKSLPDNEKSLSEKDIFVINLRGSFNDDQKDALYYDEANRIWRKLENIMHNIKEFRGNKTREYKKKDAPRLPRILPAGRDVSAFSKLMYALTMFLDGKEINDLLTTLINKFDNIQSFLKVMPLIGVNAKFVEEYAFFKDSAKIADELRLIKSFARMGEPIADARRAMYIDAIRILGTNLSYDELKALADTFSLDENGNKLKKGKHGMRNFIINNVISNKRFHYLIRYGDPAHLHEIAKNEAVVKFVLGRIADIQKKQGQNGKNQIDRYYETCIGKDKGKSVSEKVDALTKIITGMNYDQFDKKRSVIEDTGRENAEREKFKKIISLYLTVIYHILKNIVNINARYVIGFHCVERDAQLYKEKGYDINLKKLEEKGFSSVTKLCAGIDETAPDKRKDVEKEMAERAKESIDSLESANPKLYANYIKYSDEKKAEEFTRQINREKAKTALNAYLRNTKWNVIIREDLLRIDNKTCTLFRNKAVHLEVARYVHAYINDIAEVNSYFQLYHYIMQRIIMNERYEKSSGKVSEYFDAVNDEKKYNDRLLKLLCVPFGYCIPRFKNLSIEALFDRNEAAKFDKEKKKVSGNSGSGPKKKRKVAAAYPYDVPDYAASGSGKRTADGSEFES

SEQ ID NO: 472 - protein, 1483 aa, synthetic construct
MKRTADGSEFESPKKKRKVKVTKVDGISHKKYIEEGKLVKSTSEENRTSERLSELLSIRLDIYIKNPDNASEEENRIRRENLKKFFSNKVLHLKDSVLYLKNRKEKNAVQDKNYSEEDISEYDLKNKNSFSVLKKILLNEDVNSEELEIFRKDVEAKLNKINSLKYSFEENKANYQKINENNVEKVGGKSKRNIIYDYYRESAKRNDYINNVQEAFDKLYKKEDIEKLFFLIENSKKHEKYKIREYYHKIIGRKNDKENFAKIIYEEIQNVNNIKELIEKIPDMSELKKSQVFYKYYLDKEELNDKNIKYAFCHFVEIEMSQLLKNYVYKRLSNISNDKIKRIFEYQNLKKLIENKLLNKLDTYVRNCGKYNYYLQVGEIATSDFIARNRQNEAFLRNIIGVSSVAYFSLRNILETENENGITGRMRGKTVKNNKGEEKYVSGEVDKIYNENKQNEVKENLKMFYSYDFNMDNKNEIEDFFANIDEAISSIRHGIVHFNLELEGKDIFAFKNIAPSEISKKMFQNEINEKKLKLKIFKQLNSANVFNYYEKDVIIKYLKNTKFNFVNKNIPFVPSFTKLYNKIEDLRNTLKFFWSVPKDKEEKDAQIYLLKNIYYGEFLNKFVKNSKVFFKITNEVIKINKQRNQKTGHYKYQKFENIEKTVPVEYLAIIQSREMINNQDKEEKNTYIDFIQQIFLKGFIDYLNKNNLKYIESNNNNDNNDIFSKIKIKKDNKEKYDKILKNYEKHNRNKEIPHEINEFVREIKLGKILKYTENLNMFYLILKLLNHKELTNLKGSLEKYQSANKEETFSDELELINLLNLDNNRVTEDFELEANEIGKFLDFNENKIKDRKELKKFDTNKIYFDGENIIKHRAFYNIKKYGMLNLLEKIADKAKYKISLKELKEYSNKKNEIEKNYTMQQNLHRKYARPKKDEKFNDEDYKEYEKAIGNIQKYTHLKNKVEFNELNLLQGLLLKILHRLVGYTSIWERDLRFRLKGEFPENHYIEEIFNFDNSKNVKYKSGQIVEKYINFYKELYKDNVEKRSIYSDKKVKKLKQEKKDLYIRNYIAHFNYIPHAEISLLEVLENLRKLLSYDRKLKNAIMKSIVDILKEYGFVATFKIGADKKIEIQTLESEKIVHLKNLKKKKLMTDRNSEELCELVKVMFEYKALEGGGGSGGGGSGGGGSVSKGEELFTGVVPILVELDGDVNGHKFSVRGEGEGDATNGKLTLKFICTTGKLPVPWPTLVTTLTYGVQCFSRYPDHMKQHDFFKSAMPEGYVQERTISFKDDGTYKTRAEVKFEGDTLVNRIELKGIDFKEDGNILGHKLEYNFNSHNVYITADKQKNGIKANFKIRHNVEDGSVQLADHYQQNTPIGDGPVLLPDNHYLSTQSKLSKDPNEKRDHMVLLEFVTAAGITLGMDELYKGSEGAPKKKRKVGSSYPYDVPDYAYPYDVPDYAYPYDVPDYAKRTADGSEFESPKKKRKV

SEQ ID NO: 473 - protein, 1169 aa, synthetic construct
MKRTADGSEFESPKKKRKVNIPALVENQKKYFGTYSVMAMLNAQTVLDHIQKVADIEGEQNENNENLWFHPVMSHLYNAKNGYDKQPEKTMFIIERLQSYFPFLKIMAENQREYSNGKYKQNRVEVNSNDIFEVLKRAFGVLKMYRDLTNHYKTYEEKLNDGCEFLTSTEQPLSGMINNYYTVALRNMNERYGYKTEDLAFIQDKRFKFVKDAYGKKKSQVNTGFFLSLQDYNGDTQKKLHLSGVGIALLICLFLDKQYINIFLSRLPIFSSYNAQSEERRIIIRSFGINSIKLPKDRIHSEKSNKSVAMDMLNEVKRCPDELFTTLSAEKQSRFRIISDDHNEVLMKRSSDRFVPLLLQYIDYGKLFDHIRFHVNMGKLRYLLKADKTCIDGQTRVRVIEQPLNGFGRLEEAETMRKQENGTFGNSGIRIRDFENMKRDDANPANYPYIVDTYTHYILENNKVEMFINDKEDSAPLLPVIEDDRYVVKTIPSCRMSTLEIPAMAFHMFLFGSKKTEKLIVDVHNRYKRLFQAMQKEEVTAENIASFGIAESDLPQKILDLISGNAHGKDVDAFIRLTVDDMLTDTERRIKRFKDDRKSIRSADNKMGKRGFKQISTGKLADFLAKDIVLFQPSVNDGENKITGLNYRIMQSAIAVYDSGDDYEAKQQFKLMFEKARLIGKGTTEPHPFLYKVFARSIPANAVEFYERYLIERKFYLTGLSNEIKKGNRVDVPFIRRDQNKWKTPAMKTLGRIYSEDLPVELPRQMFDNEIKSHLKSLPQMEGIDFNNANVTYLIAEYMKRVLDDDFQTFYQWNRNYRYMDMLKGEYDRKGSLQHCFTSVEEREGLWKERASRTERYRKQASNKIRSNRQMRNASSEEIETILDKRLSNSRNEYQKSEKVIRRYRVQDALLFLLAKKTLTELADFDGERFKLKEIMPDAEKGILSEIMPMSFTFEKGGKKYTITSEGMKLKNYGDFFVLASDKRIGNLLELVGSDIVSKEDIMEEFNKYDQCRPEISSIVFNLEKWAFDTYPELSARVDREEKVDFKSILKILLNNKNINKEQSDILRKIRNAFDHNNYPDKGVVEIKALPEIAMSIKKAFGEYAIMKGSLQLPPLERLTLGSSYPYDVPDYAYPYDVPDYAYPYDVPDYAKRTADGSEFESPKKKRKV

SEQ ID NO: 474 - protein, 1041 aa, synthetic construct
MKRTADGSEFESPKKKRKVSPKKKRKVEASIEKKKSFAKGMGVKSTLVSGSKVYMTTFAEGSDARLEKIVEGDSIRSVNEGEAFSAEMADKNAGYKIGNAKFSHPKGYAVVANNPLYTGPVQQDMLGLKETLEKRYFGESADGNDNICIQVIHNILDIEKILAEYITNAAYAVNNISGLDKDIIGFGKFSTVYTYDEFKDPEHHRAAFNNNDKLINAIKAQYDEFDNFLDNPRLGYFGQAFFSKEGRNYIINYGNECYDILALLSGLRHWVVHNNEEESRISRTWLYNLDKNLDNEYISTLNYLYDRITNELTNSFSKNSAANVNYIAETLGINPAEFAEQYFRFSIMKEQKNLGFNITKLREVMLDRKDMSEIRKNHKVFDSIRTKVYTMMDFVIYRYYIEEDAKVAAANKSLPDNEKSLSEKDIFVINLRGSFNDDQKDALYYDEANRIWRKLENIMHNIKEFRGNKTREYKKKDAPRLPRILPAGRDVSAFSKLMYALTMFLDGKEINDLLTTLINKFDNIQSFLKVMPLIGVNAKFVEEYAFFKDSAKIADELRLIKSFARMGEPIADARRAMYIDAIRILGTNLSYDELKALADTFSLDENGNKLKKGKHGMRNFIINNVISNKRFHYLIRYGDPAHLHEIAKNEAVVKFVLGRIADIQKKQGQNGKNQIDRYYETCIGKDKGKSVSEKVDALTKIITGMNYDQFDKKRSVIEDTGRENAEREKFKKIISLYLTVIYHILKNIVNINARYVIGFHCVERDAQLYKEKGYDINLKKLEEKGFSSVTKLCAGIDETAPDKRKDVEKEMAERAKESIDSLESANPKLYANYIKYSDEKKAEEFTRQINREKAKTALNAYLRNTKWNVIIREDLLRIDNKTCTLFRNKAVHLEVARYVHAYINDIAEVNSYFQLYHYIMQRIIMNERYEKSSGKVSEYFDAVNDEKKYNDRLLKLLCVPFGYCIPRFKNLSIEALFDRNEAAKFDKEKKKVSGNSGSGPKKKRKVAAAYPYDVPDYAASGSGKRTADGSEFESPKKKRKV

SEQ ID NO: 475 - protein, 1326 aa, synthetic construct
MKRTADGSEFESPKKKRKVTTTMKISIEFLEPFRMTKWQESTRRNKNNKEFVRGQAFARWHRNKKDNTKGRPYITGTLLRSAVIRSAENLLTLSDGKISEKTCCPGKFDTEDKDRLLQLRQRSTLRWTDKNPCPDNAETYCPFCELLGRSGNDGKKAEKKDWRFRIHFGNLSLPGKPDFDGPKAIGSQRVLNRVDFKSGKAHDFFKAYEVDHTRFPRFEGEITIDNKVSAEARKLLCDSLKFTDRLCGALCVIRFDEYTPAADSGKQTENVQAEPNANLAEKTAEQIISILDDNKKTEYTRLLADAIRSLRRSSKLVAGLPKDHDGKDDHYLWDIGKKKKDENSVTIRQILTTSADTKELKNAGKWREFCEKLGEALYLKSKDMSGGLKITRRILGDAEFHGKPDRLEKSRSVSIGSVLKETVVCGELVAKTPFFFGAIDEDAKQTDLQVLLTPDNKYRLPRSAVRGILRRDLQTYFDSPCNAELGGRPCMCKTCRIMRGITVMDARSEYNAPPEIRHRTRINPFTGTVAEGALFNMEVAPEGIVFPFQLRYRGSEDGLPDALKTVLKWWAEGQAFMSGAASTGKGRFRMENAKYETLDLSDENQRNDYLKNWGWRDEKGLEELKKRLNSGLPEPGNYRDPKWHEINVSIEMASPFINGDPIRAAVDKRGTDVVTFVKYKAEGEEAKPVCAYKAESFRGVIRSAVARIHMEDGVPLTELTHSDCECLLCQIFGSEYEAGKIRFEDLVFESDPEPVTFDHVAIDRFTGGAADKKKFDDSPLPGSPARPLMLKGSFWIRRDVLEDEEYCKALGKALADVNNGLYPLGGKSAIGYGQVKSLGIKGDDKRISRLMNPAFDETDVAVPEKPKTDAEVRIEAEKVYYPHYFVEPHKKVEREEKPCGHQKFHEGRLTGKIRCKLITKTPLIVPDTSNDDFFRPADKEARKEKDEYHKSYAFFRLHKQIMIPGSELRGMVSSVYETVTNSCFRIFDETKRLSWRGGGSRTVDDRMIGKRMSADLRPCHGDWVEDGDLSALNAYPEKRLLLRHPKGLCPACRLFGTGSYKGRVRFGFASLENDPEWLIPGKNPGDPFHGGPVMLSLLERPRPTWSIPGSDNKFKVPGRKFYVHHHAWKTIKDGNHPTTGKAIEQSPNNRTVEALAGGNSFSFEIAFENLKEWELGLLIHSLQLEKGLAHKLGMAKSMGFGSVEIDVESVRLRKDWKQWRNGNSEIPNWLGKGFAKLKEWFRDELDFIENLKKLLWFPEGDQAPRVCYPMLRKKDDPNGNSGYEELKRGEFKKEDRQKKLTTPWTPWAKRTADGSEFESPKKKRKV

SEQ ID NO: 476 - protein, 1637 aa, synthetic construct; identical to SEQ ID NO: 191

SEQ ID NO: 477 - protein, 1637 aa, synthetic construct; identical to SEQ ID NO: 192

SEQ ID NO: 478 - protein, 1637 aa, synthetic construct; identical to SEQ ID NO: 193

SEQ ID NO: 479 - protein, 1637 aa, synthetic construct; identical to SEQ ID NO: 194

SEQ ID NO: 480 - protein, 1354 aa, synthetic construct
MKRTADGSEFESPKKKRKVTTTMKISIEFLEPFRMTKWQESTRRNKNNKEFVRGQAFARWHRNKKDNTKGRPYITGTLLRSAVIRSAENLLTLSDGKISEKTCCPGKFDTEDKDRLLQLRQRSTLRWTDKNPCPDNAETYCPFCELLGRSGNDGKKAEKKDWRFRIHFGNLSLPGKPDFDGPKAIGSQRVLNRVDFKSGKAHDFFKAYEVDHTRFPRFEGEITIDNKVSAEARKLLCDSLKFTDRLCGALCVIRFDEYTPAADSGKQTENVQAEPNANLAEKTAEQIISILDDNKKTEKTRLLADAIRSLRRSSKLVAGLPKDHDGKDDHYLWDIGKKKKDENSVTIRQILTTSADTKELKNAGKWREFCEKLGEALYLKSKDMSGGLKITRRILGDAEFHGKPDRLEKSRSVSIGSVLKETVVCGELVAKTPFFFGAIDEDAKQTDLQVLLTPDNKYRLPRSAVRGILRRDLQTYFDSPCNAELGGRPCMCKTCRIMRGITVMDARSEYNAPPEIRHRTRINPFTGTVAEGALFNMEVAPEGIVFPFQLRYRGSEDGLPDALKTVLKWWAEGQAFMSGAASTGKGRFRMENAKYETLDLSDENQRNDYLKNWGWRDEKGLEELKKRLNSGLPEPGNYRDPKWHEINVSIEMASPFINGDPIRAAVDKRGTDVVTFVKYKAEGEEAKPVCAYKAESFRGVIRSAVARIHMEDGVPLTELTHSDCECLLCQIFGSEYEAGKIRFEDLVFESDPEPVTFDHVAIDRFTGGAADKKKFDDSPLPGSPARPLMLKGSFWIRRDVLEDEEYCKALGKALADVNNGLYPLGGKSAIGYGQVKSLGIKGDDKRISRLMNPAFDETDVAVPEKPKTDAEVRIEAEKVYYPHYFVEPHKKVEREEKPCGHQKFHEGRLTGKIRCKLITKTPLIVPDTSNDDFFRPADKEARKEKDEYHKSYAFFRLHKQIMIPGSELRGMVSSVYETVTNSCFRIFDETKRLSWRMDADHQNVLQDFLPGRVTADGKHIQKFSGGGSRTVDDRMIGKRMSADLRPCHGDWVEDGDLSALNAYPEKRLLLRHPKGLCPACRLFGTGSYKGRVRFGFASLENDPEWLIPGKNPGDPFHGGPVMLSLLERPRPTWSIPGSDNKFKVPGRKFYVHHHAWKTIKDGNHPTTGKAIEQSPNNRTVEALAGGNSFSFEIAFENLKEWELGLLIHSLQLEKGLAHKLGMAKSMGFGSVEIDVESVRLRKDWKQWRNGNSEIPNWLGKGFAKLKEWFRDELDFIENLKKLLWFPEGDQAPRVCYPMLRKKDDPNGNSGYEELKRGEFKKEDRQKKLTTPWTPWAKRTADGSEFESPKKKRKV

SEQ ID NO: 481 - protein, 1354 aa, synthetic construct
MKRTADGSEFESPKKKRKVTTTMKISIEFLEPFRMTKWQESTRRNKNNKEFVRGQAFARWHRNKKDNTKGRPYITGTLLRSAVIRSAENLLTLSDGKISEKTCCPGKFDTEDKDRLLQLRQRSTLRWTDKNPCPDNAETYCPFCELLGRSGNDGKKAEKKDWRFRIHFGNLSLPGKPDFDGPKAIGSQRVLNRVDFKSGKAHDFFKAYEVDHTRFPRFEGEITIDNKVSAEARKLLCDSLKFTDRLCGALCVIRFDEYTPAADSGKQTENVQAEPNANLAEKTAEQIISILDDNKKTRYTRLLADAIRSLRRSSKLVAGLPKDHDGKDDHYLWDIGKKKKDENSVTIRQILTTSADTKELKNAGKWREFCEKLGEALYLKSKDMSGGLKITRRILGDAEFHGKPDRLEKSRSVSIGSVLKETVVCGELVAKTPFFFGAIDEDAKQTDLQVLLTPDNKYRLPRSAVRGILRRDLQTYFDSPCNAELGGRPCMCKTCRIMRGITVMDARSEYNAPPEIRHRTRINPFTGTVAEGALFNMEVAPEGIVFPFQLRYRGSEDGLPDALKTVLKWWAEGQAFMSGAASTGKGRFRMENAKYETLDLSDENQRNDYLKNWGWRDEKGLEELKKRLNSGLPEPGNYRDPKWHEINVSIEMASPFINGDPIRAAVDKRGTDVVTFVKYKAEGEEAKPVCAYKAESFRGVIRSAVARIHMEDGVPLTELTHSDCECLLCQIFGSEYEAGKIRFEDLVFESDPEPVTFDHVAIDRFTGGAADKKKFDDSPLPGSPARPLMLKGSFWIRRDVLEDEEYCKALGKALADVNNGLYPLGGKSAIGYGQVKSLGIKGDDKRISRLMNPAFDETDVAVPEKPKTDAEVRIEAEKVYYPHYFVEPHKKVEREEKPCGHQKFHEGRLTGKIRCKLITKTPLIVPDTSNDDFFRPADKEARKEKDEYHKSYAFFRLHKQIMIPGSELRGMVSSVYETVTNSCFRIFDETKRLSWRMDADHQNVLQDFLPGRVTADGKHIQKFSGGGSRTVDDRMIGKRMSADLRPCHGDWVEDGDLSALNAYPEKRLLLRHPKGLCPACRLFGTGSYKGRVRFGFASLENDPEWLIPGKNPGDPFHGGPVMLSLLERPRPTWSIPGSDNKFKVPGRKFYVHHHAWKTIKDGNHPTTGKAIEQSPNNRTVEALAGGNSFSFEIAFENLKEWELGLLIHSLQLEKGLAHKLGMAKSMGFGSVEIDVESVRLRKDWKQWRNGNSEIPNWLGKGFAKLKEWFRDELDFIENLKKLLWFPEGDQAPRVCYPMLRKKDDPNGNSGYEELKRGEFKKEDRQKKLTTPWTPWAKRTADGSEFESPKKKRKV

SEQ ID NO: 482 - protein, 1354 aa, synthetic construct
MKRTADGSEFESPKKKRKVTTTMKISIEFLEPFRMTKWQESTRRNKNNKEFVRGQAFARWHRNKKDNTKGRPYITGTLLRSAVIRSAENLLTLSDGKISEKTCCPGKFDTEDKDRLLQLRQRSTLRWTDKNPCPDNAETYCPFCELLGRSGNDGKKAEKKDWRFRIHFGNLSLPGKPDFDGPKAIGSQRVLNRVDFKSGKAHDFFKAYEVDHTRFPRFEGEITIDNKVSAEARKLLCDSLKFTDRLCGALCVIRFDEYTPAADSGKQTENVQAEPNANLAEKTAEQIISILDDNKKTEYTRLLADAIRSLRRSSKLVAGLPKDHDGKDDHYLWDIGKKKKDENSVTIRQILTTSADTKELKNAGKWREFCEKLGEALYLKSKDMSGGLKITRRILGDAEFHGKPDRLEKSRSVSIGSVLKETVVCGELVAKTPFFFGAIDEDAKQTDLQVLLTPDNKYRLPRSAVRGILRRDLQTYFDSPCNAELGGRPCMCKTCRIMRGITVMDARSEYNAPPEIRHRTRINPFTGTVAEGALFNMEVAPEGIVFPFQLRYRGSEDGLPDALKTVLKWWAEGQAFMSGAASTGKGRFRMENAKYETLDLSDENQRNDYLKNWGWRDEKGLEELKKRLNSGLPEPGNYRDPKWHEINVSIEMASPFINGDPIRAAVDKRGTDVVTFVKYKAEGEEAKPVCAYKAESFRGVIRSAVARIHMEDGVPLTELTHSDCECLLCQIFGSEYEAGKIRFEDLVFESDPEPVTFDHVAIDRFTGGAADKKKFDDSPLPGSPARPLMLKGSFWIRRDVLEDEEYCKALGKALADVNNGLYPLGGKSAIGYGQVKSLGIKGDDKRISRLMNPAFDETDVAVPEKPKTDAEVRIEAEKVYYPHYFVEPHKKVEREEKPCGHQKFHEGRLTGKIRCKLITKTPLIVPDTSNDDFFRPADKEARKEKDEYHKSYAFFRLHKQIMIPGSELRGMVSSVYETVTNSCFRIFDETKRLSWRMDADHQNVLQKFLPGRVTADGKHIQKFSGGGSRTVDDRMIGKRMSADLRPCHGDWVEDGDLSALNAYPEKRLLLRHPKGLCPACRLFGTGSYKGRVRFGFASLENDPEWLIPGKNPGDPFHGGPVMLSLLERPRPTWSIPGSDNKFKVPGRKFYVHHHAWKTIKDGNHPTTGKAIEQSPNNRTVEALAGGNSFSFEIAFENLKEWELGLLIHSLQLEKGLAHKLGMAKSMGFGSVEIDVESVRLRKDWKQWRNGNSEIPNWLGKGFAKLKEWFRDELDFIENLKKLLWFPEGDQAPRVCYPMLRKKDDPNGNSGYEELKRGEFKKEDRQKKLTTPWTPWAKRTADGSEFESPKKKRKV

SEQ ID NO: 483 - protein, 1354 aa, synthetic construct
MKRTADGSEFESPKKKRKVTTTMKISIEFLEPFRMTKWQESTRRNKNNKEFVRGQAFARWHRNKKDNTKGRPYITGTLLRSAVIRSAENLLTLSDGKISEKTCCPGKFDTEDKDRLLQLRQRSTLRWTDKNPCPDNAETYCPFCELLGRSGNDGKKAEKKDWRFRIHFGNLSLPGKPDFDGPKAIGSQRVLNRVDFKSGKAHDFFKAYEVDHTRFPRFEGEITIDNKVSAEARKLLCDSLKFTDRLCGALCVIRFDEYTPAADSGKQTENVQAEPNANLAEKTAEQIISILDDNKKTEYTRLLADAIRSLRRSSKLVAGLPKDHDGKDDHYLWDIGKKKKDENSVTIRQILTTSADTKELKNAGKWREFCEKLGEALYLKSKDMSGGLKITRRILGDAEFHGKPDRLEKSRSVSIGSVLKETVVCGELVAKTPFFFGAIDEDAKQTDLQVLLTPDNKYRLPRSAVRGILRRDLQTYFDSPCNAELGGRPCMCKTCRIMRGITVMDARSEYNAPPEIRHRTRINPFTGTVAEGALFNMEVAPEGIVFPFQLRYRGSEDGLPDALKTVLKWWAEGQAFMSGAASTGKGRFRMENAKYETLDLSDENQRNDYLKNWGWRDEKGLEELKKRLNSGLPEPGNYRDPKWHEINVSIEMASPFINGDPIRAAVDKRGTDVVTFVKYKAEGEEAKPVCAYKAESFRGVIRSAVARIHMEDGVPLTELTHSDCECLLCQIFGSEYEAGKIRFEDLVFESDPEPVTFDHVAIDRFTGGAADKKKFDDSPLPGSPARPLMLKGSFWIRRDVLEDEEYCKALGKALADVNNGLYPLGGKSAIGYGQVKSLGIKGDDKRISRLMNPAFDETDVAVPEKPKTDAEVRIEAEKVYYPHYFVEPHKKVEREEKPCGHQKFHEGRLTGKIRCKLITKTPLIVPDTSNDDFFRPADKEARKEKDEYHKSYAFFRLHKQIMIPGSELRGMVSSVYETVTNSCFRIFDETKRLSWRMDAKHQNVLQKFLPGRVTADGKHIQKFSGGGSRTVDDRMIGKRMSADLRPCHGDWVEDGDLSALNAYPEKRLLLRHPKGLCPACRLFGTGSYKGRVRFGFASLENDPEWLIPGKNPGDPFHGGPVMLSLLERPRPTWSIPGSDNKFKVPGRKFYVHHHAWKTIKDGNHPTTGKAIEQSPNNRTVEALAGGNSFSFEIAFENLKEWELGLLIHSLQLEKGLAHKLGMAKSMGFGSVEIDVESVRLRKDWKQWRNGNSEIPNWLGKGFAKLKEWFRDELDFIENLKKLLWFPEGDQAPRVCYPMLRKKDDPNGNSGYEELKRGEFKKEDRQKKLTTPWTPWAKRTADGSEFESPKKKRKV

SEQ ID NO: 484 - protein, 1354 aa, synthetic construct
MKRTADGSEFESPKKKRKVTTTMKISIEFLEPFRMTKWQESTRRNKNNKEFVRGQAFARWHRNKKDNTKGRPYITGTLLRSAVIRSAENLLTLSDGKISEKTCCPGKFDTEDKDRLLQLRQRSTLRWTDKNPCPDNAETYCPFCELLGRSGNDGKKAEKKDWRFRIHFGNLSLPGKPDFDGPKAIGSQRVLNRVDFKSGKAHDFFKAYEVDHTRFPRFEGEITIDNKVSAEARKLLCDSLKFTDRLCGALCVIRFDEYTPAADSGKQTENVQAEPNANLAEKTAEQIISILDDNKKTEYTRLLADAIRSLRRSSKLVAGLPKDHDGKDDHKLWDIGKKKKDENSVTIRQILTTSADTKELKNAGKWREFCEKLGEALYLKSKDMSGGLKITRRILGDAEFHGKPDRLEKSRSVSIGSVLKETVVCGELVAKTPFFFGAIDEDAKQTDLQVLLTPDNKYRLPRSAVRGILRRDLQTYFDSPCNAELGGRPCMCKTCRIMRGITVMDARSEYNAPPEIRHRTRINPFTGTVAEGALFNMEVAPEGIVFPFQLRYRGSEDGLPDALKTVLKWWAEGQAFMSGAASTGKGRFRMENAKYETLDLSDENQRNDYLKNWGWRDEKGLEELKKRLNSGLPEPGNYRDPKWHEINVSIEMASPFINGDPIRAAVDKRGTDVVTFVKYKAEGEEAKPVCAYKAESFRGVIRSAVARIHMEDGVPLTELTHSDCECLLCQIFGSEYEAGKIRFEDLVFESDPEPVTFDHVAIDRFTGGAADKKKFDDSPLPGSPARPLMLKGSFWIRRDVLEDEEYCKALGKALADVNNGLYPLGGKSAIGYGQVKSLGIKGDDKRISRLMNPAFDETDVAVPEKPKTDAEVRIEAEKVYYPHYFVEPHKKVEREEKPCGHQKFHEGRLTGKIRCKLITKTPLIVPDTSNDDFFRPADKEARKEKDEYHKSYAFFRLHKQIMIPGSELRGMVSSVYETVTNSCFRIFDETKRLSWRMDAKHQNVLQKFLPGRVTADGKHIQKFSGGGSRTVDDRMIGKRMSADLRPCHGDWVEDGDLSALNAYPEKRLLLRHPKGLCPACRLFGTGSYKGRVRFGFASLENDPEWLIPGKNPGDPFHGGPVMLSLLERPRPTWSIPGSDNKFKVPGRKFYVHHHAWKTIKDGNHPTTGKAIEQSPNNRTVEALAGGNSFSFEIAFENLKEWELGLLIHSLQLEKGLAHKLGMAKSMGFGSVEIDVESVRLRKDWKQWRNGNSEIPNWLGKGFAKLKEWFRDELDFIENLKKLLWFPEGDQAPRVCYPMLRKKDDPNGNSGYEELKRGEFKKEDRQKKLTTPWTPWAKRTADGSEFESPKKKRKV

SEQ ID NO: 485 - protein, 1479 aa, synthetic construct
MKRTADGSEFESPKKKRKVTTTMKISIEFLEPFRMTKWQESTRRNKNNKEFVRGQAFARWHRNKKDNTKGRPYITGTLLRSAVIRSAENLLTLSDGKISEKTCCPGKFDTEDKDRLLQLRQRSTLRWTDKNPCPDNAETYCPFCELLGRSGNDGKKAEKKDWRFRIHFGNLSLPGKPDFDGPKAIGSQRVLNRVDFKSGKAHDFFKAYEVDHTRFPRFEGEITIDNKVSAEARKLLCDSLKFTDRLCGALCVIRFDEYTPAADSGKQTENVQAEPNANLAEKTAEQIISILDDNKKTEYTRLLADAIRSLRRSSKLVAGLPKDHDGKDDHYLWDIGKKKKDENSVTIRQILTTSADTKELKNAGKWREFCEKLGEALYLKSKDMSGGLKITRRILGDAEFHGKPDRLEKSRSVSIGSVLKETVVCGELVAKTPFFFGAIDEDAKQTDLQVLLTPDNKYRLPRSAVRGILRRDLQTYFDSPCNAELGGRPCMCKTCRIMRGITVMDARSEYNAPPEIRHRTRINPFTGTVAEGALFNMEVAPEGIVFPFQLRYRGSEDGLPDALKTVLKWWAEGQAFMSGAASTGKGRFRMENAKYETLDLSDENQRNDYLKNWGWRDEKGLEELKKRLNSGLPEPGNYRDPKWHEINVSIEMASPFINGDPIRAAVDKRGTDVVTFVKYKAEGEEAKPVCAYKAESFRGVIRSAVARIHMEDGVPLTELTHSDCECLLCQIFGSEYEAGKIRFEDLVFESDPEPVTFDHVAIDRFTGGAADKKKFDDSPLPGSPARPLMLKGSFWIRRDVLEDEEYCKALGKALADVNNGLYPLGGKSAIGYGQVKSLGIKGDDKRISRLMNPAFDETDVAVPEKPKTDAEVRIEAEKVYYPHYFVEPHKKVEREEKPCGHQKFHEGRLTGKIRCKLITKTPLIVPDTSNDDFFRPADKEARKEKDEYHKSYAFFRLHKQIMIPGSELRGMVSSVYETVTNSCFRIFDETKRLSWRMDADHQNVLQDFLPGRVTADGKHIQKFSGGGSRTVDDRMIGKRMSADLRPCHGDWVEDGDLSALNAYPEKRLLLRHPKGLCPACRLFGTGSYKGRVRFGFASLENDPEWLIPGKNPGDPFHGGPVMLSLLERPRPTWSIPGSDNKFKVPGRKFYVHHHAWKTIKDGNHPTTGKAIEQSPNNRTVEALAGGNSFSFEIAFENLKEWELGLLIHSLQLEKGLAHKLGMAKSMGFGSVEIDVESVRLRKDWKQWRNGNSEIPNWLGKGFAKLKEWFRDELDFIENLKKLLWFPEGDQAPRVCYPMLRKKDDPNGNSGYEELKDGEFKKEDRQKKLTTPWTPWAMAMQAAKRANIRLPPEVNRILYIRNLPYKITAEEMYDIFGKYGPIRQIRVGNTPETRGTAYVVYEDIFDAKNACDHLSGFNVCNRYLVVLYYNANRAFQKMDTKKKEEQLKLLKEKYGINTDPPKKRTADGSEFESPKKKRKV

SEQ ID NO: 486 - protein, 1594 aa, synthetic construct
MKRTADGSEFESPKKKRKVTTTMKISIEFLEPFRMTKWQESTRRNKNNKEFVRGQAFARWHRNKKDNTKGRPYITGTLLRSAVIRSAENLLTLSDGKISEKTCCPGKFDTEDKDRLLQLRQRSTLRWTDKNPCPDNAETYCPFCELLGRSGNDGKKAEKKDWRFRIHFGNLSLPGKPDFDGPKAIGSQRVLNRVDFKSGKAHDFFKAYEVDHTRFPRFEGEITIDNKVSAEARKLLCDSLKFTDRLCGALCVIRFDEYTPAADSGKQTENVQAEPNANLAEKTAEQIISILDDNKKTEYTRLLADAIRSLRRSSKLVAGLPKDHDGKDDHYLWDIGKKKKDENSVTIRQILTTSADTKELKNAGKWREFCEKLGEALYLKSKDMSGGLKITRRILGDAEFHGKPDRLEKSRSVSIGSVLKETVVCGELVAKTPFFFGAIDEDAKQTDLQVLLTPDNKYRLPRSAVRGILRRDLQTYFDSPCNAELGGRPCMCKTCRIMRGITVMDARSEYNAPPEIRHRTRINPFTGTVAEGALFNMEVAPEGIVFPFQLRYRGSEDGLPDALKTVLKWWAEGQAFMSGAASTGKGRFRMENAKYETLDLSDENQRNDYLKNWGWRDEKGLEELKKRLNSGLPEPGNYRDPKWHEINVSIEMASPFINGDPIRAAVDKRGTDVVTFVKYKAEGEEAKPVCAYKAESFRGVIRSAVARIHMEDGVPLTELTHSDCECLLCQIFGSEYEAGKIRFEDLVFESDPEPVTFDHVAIDRFTGGAADKKKFDDSPLPGSPARPLMLKGSFWIRRDVLEDEEYCKALGKALADVNNGLYPLGGKSAIGYGQVKSLGIKGDDKRISRLMNPAFDETDVAVPEKPKTDAEVRIEAEKVYYPHYFVEPHKKVEREEKPCGHQKFHEGRLTGKIRCKLITKTPLIVPDTSNDDFFRPADKEARKEKDEYHKSYAFFRLHKQIMIPGSELRGMVSSVYETVTNSCFRIFDETKRLSWRMDADHQNVLQDFLPGRVTADGKHIQKFSGGGSRTVDDRMIGKRMSADLRPCHGDWVEDGDLSALNAYPEKRLLLRHPKGLCPACRLFGTGSYKGRVRFGFASLENDPEWLIPGKNPGDPFHGGPVMLSLLERPRPTWSIPGSDNKFKVPGRKFYVHHHAWKTIKDGNHPTTGKAIEQSPNNRTVEALAGGNSFSFEIAFENLKEWELGLLIHSLQLEKGLAHKLGMAKSMGFGSVEIDVESVRLRKDWKQWRNGNSEIPNWLGKGFAKLKEWFRDELDFIENLKKLLWFPEGDQAPRVCYPMLRKKDDPNGNSGYEELKDGEFKKEDRQKKLTTPWTPWAMAEYLASIFGTEKDKVNCSFYFKIGACRHGDRCSRLHNKPTFSQTIALLNIYRNPQNSSQSADGLRCAVSDVEMQEHYDEFFEEVFTEMEEKYGEVEEMNVCDNLGDHLVGNVYVKFRREEDAEKAVIDLNNRWFNGQPLHAELSPVTDFREACCRQYEMGECTRGGFCNFMHLKPISRELRRELYGRRRKKHRSRSRSRERRSRSRDRGRGGGGGGGGGGGGRERDRRRSRDRERSGRFKRTADGSEFESPKKKRKV

SEQ ID NO: 487 - protein, 1755 aa, synthetic construct
MKRTADGSEFESPKKKRKVTTTMKISIEFLEPFRMTKWQESTRRNKNNKEFVRGQAFARWHRNKKDNTKGRPYITGTLLRSAVIRSAENLLTLSDGKISEKTCCPGKFDTEDKDRLLQLRQRSTLRWTDKNPCPDNAETYCPFCELLGRSGNDGKKAEKKDWRFRIHFGNLSLPGKPDFDGPKAIGSQRVLNRVDFKSGKAHDFFKAYEVDHTRFPRFEGEITIDNKVSAEARKLLCDSLKFTDRLCGALCVIRFDEYTPAADSGKQTENVQAEPNANLAEKTAEQIISILDDNKKTEYTRLLADAIRSLRRSSKLVAGLPKDHDGKDDHYLWDIGKKKKDENSVTIRQILTTSADTKELKNAGKWREFCEKLGEALYLKSKDMSGGLKITRRILGDAEFHGKPDRLEKSRSVSIGSVLKETVVCGELVAKTPFFFGAIDEDAKQTDLQVLLTPDNKYRLPRSAVRGILRRDLQTYFDSPCNAELGGRPCMCKTCRIMRGITVMDARSEYNAPPEIRHRTRINPFTGTVAEGALFNMEVAPEGIVFPFQLRYRGSEDGLPDALKTVLKWWAEGQAFMSGAASTGKGRFRMENAKYETLDLSDENQRNDYLKNWGWRDEKGLEELKKRLNSGLPEPGNYRDPKWHEINVSIEMASPFINGDPIRAAVDKRGTDVVTFVKYKAEGEEAKPVCAYKAESFRGVIRSAVARIHMEDGVPLTELTHSDCECLLCQIFGSEYEAGKIRFEDLVFESDPEPVTFDHVAIDRFTGGAADKKKFDDSPLPGSPARPLMLKGSFWIRRDVLEDEEYCKALGKALADVNNGLYPLGGKSAIGYGQVKSLGIKGDDKRISRLMNPAFDETDVAVPEKPKTDAEVRIEAEKVYYPHYFVEPHKKVEREEKPCGHQKFHEGRLTGKIRCKLITKTPLIVPDTSNDDFFRPADKEARKEKDEYHKSYAFFRLHKQIMIPGSELRGMVSSVYETVTNSCFRIFDETKRLSWRMDADHQNVLQDFLPGRVTADGKHIQKFSGGGSRTVDDRMIGKRMSADLRPCHGDWVEDGDLSALNAYPEKRLLLRHPKGLCPACRLFGTGSYKGRVRFGFASLENDPEWLIPGKNPGDPFHGGPVMLSLLERPRPTWSIPGSDNKFKVPGRKFYVHHHAWKTIKDGNHPTTGKAIEQSPNNRTVEALAGGNSFSFEIAFENLKEWELGLLIHSLQLEKGLAHKLGMAKSMGFGSVEIDVESVRLRKDWKQWRNGNSEIPNWLGKGFAKLKEWFRDELDFIENLKKLLWFPEGDQAPRVCYPMLRKKDDPNGNSGYEELKDGEFKKEDRQKKLTTPWTPWAMSLYDDLGVETSDSKTEGWSKNFKLLQSQLQVKKAALTQAKSQRTKQSTVLAPVIDLKRGGSSDDRQIVDTPPHVAAGLKDPVPSGFSAGEVLIPLADEYDPMFPNDYEKVVKRQREERQRQRELERQKEIEEREKRRKDRHEASGFARRPDPDSDEDEDYERERRKRSMGGAAIAPPTSLVEKDKELPRDFPYEEDSRPRSQSSKAAIPPPVYEEQDRPRSPTGPSNSFLANMGGTVAHKIMQKYGFREGQGLGKHEQGLSTALSVEKTSKRGGKIIVGDATEKDASKKSDSNPLTEILKCPTKVVLLRNMVGAGEVDEDLEVETKEECEKYGKVGKCVIFEIPGAPDDEAVRIFLEFERVESAIKAVVDLNGRYFGGRVVKACFYNLDKFRVLDLAEQVKRTADGSEFESPKKKRKV

SEQ ID NO: 488 - protein, 1829 aa, synthetic construct
MKRTADGSEFESPKKKRKVTTTMKISIEFLEPFRMTKWQESTRRNKNNKEFVRGQAFARWHRNKKDNTKGRPYITGTLLRSAVIRSAENLLTLSDGKISEKTCCPGKFDTEDKDRLLQLRQRSTLRWTDKNPCPDNAETYCPFCELLGRSGNDGKKAEKKDWRFRIHFGNLSLPGKPDFDGPKAIGSQRVLNRVDFKSGKAHDFFKAYEVDHTRFPRFEGEITIDNKVSAEARKLLCDSLKFTDRLCGALCVIRFDEYTPAADSGKQTENVQAEPNANLAEKTAEQIISILDDNKKTEYTRLLADAIRSLRRSSKLVAGLPKDHDGKDDHYLWDIGKKKKDENSVTIRQILTTSADTKELKNAGKWREFCEKLGEALYLKSKDMSGGLKITRRILGDAEFHGKPDRLEKSRSVSIGSVLKETVVCGELVAKTPFFFGAIDEDAKQTDLQVLLTPDNKYRLPRSAVRGILRRDLQTYFDSPCNAELGGRPCMCKTCRIMRGITVMDARSEYNAPPEIRHRTRINPFTGTVAEGALFNMEVAPEGIVFPFQLRYRGSEDGLPDALKTVLKWWAEGQAFMSGAASTGKGRFRMENAKYETLDLSDENQRNDYLKNWGWRDEKGLEELKKRLNSGLPEPGNYRDPKWHEINVSIEMASPFINGDPIRAAVDKRGTDVVTFVKYKAEGEEAKPVCAYKAESFRGVIRSAVARIHMEDGVPLTELTHSDCECLLCQIFGSEYEAGKIRFEDLVFESDPEPVTFDHVAIDRFTGGAADKKKFDDSPLPGSPARPLMLKGSFWIRRDVLEDEEYCKALGKALADVNNGLYPLGGKSAIGYGQVKSLGIKGDDKRISRLMNPAFDETDVAVPEKPKTDAEVRIEAEKVYYPHYFVEPHKKVEREEKPCGHQKFHEGRLTGKIRCKLITKTPLIVPDTSNDDFFRPADKEARKEKDEYHKSYAFFRLHKQIMIPGSELRGMVSSVYETVTNSCFRIFDETKRLSWRMDADHQNVLQDFLPGRVTADGKHIQKFSGGGSRTVDDRMIGKRMSADLRPCHGDWVEDGDLSALNAYPEKRLLLRHPKGLCPACRLFGTGSYKGRVRFGFASLENDPEWLIPGKNPGDPFHGGPVMLSLLERPRPTWSIPGSDNKFKVPGRKFYVHHHAWKTIKDGNHPTTGKAIEQSPNNRTVEALAGGNSFSFEIAFENLKEWELGLLIHSLQLEKGLAHKLGMAKSMGFGSVEIDVESVRLRKDWKQWRNGNSEIPNWLGKGFAKLKEWFRDELDFIENLKKLLWFPEGDQAPRVCYPMLRKKDDPNGNSGYEELKDGEFKKEDRQKKLTTPWTPWAMSDFDEFERQLNENKQERDKENRHRKRSHSRSRSRDRKRRSRSRDRRNRDQRSASRDRRRRSKPLTRGAKEEHGGLIRSPRHEKKKKVRKYWDVPPPGFEHITPMQYKAMQAAGQIPATALLPTMTPDGLAVTPTPVPVVGSQMTRQARRLYVGNIPFGITEEAMMDFFNAQMRLGGLTQAPGNPVLAVQINQDKNFAFLEFRSVDETTQAMAFDGIIFQGQSLKIRRPHDYQPLPGMSENPSVYVPGVVSTVVPDSAHKLFIGGLPNYLNDDQVKELLTSFGPLKAFNLVKDSATGLSKGYAFCEYVDINVTDQAIAGLNGMQLGDKKLLVQRASVGAKNATLVSPPSTINQTPVTLQVPGLMSSQVQMGGHPTEVLCLMNMVLPEELLDDEEYEEIVEDVRDECSKYGLVKSIEIPRPVDGVEVPGCGKIFVEFTSVFDCQKAMQGLTGRKFANRVVVTKYCDPDSYHRRDFWKRTADGSEFESPKKKRKV

SEQ ID NO: 489 - protein, 1354 aa, synthetic construct
MKRTADGSEFESPKKKRKVTTTMKISIEFLEPFRMTKWQESTRRNKNNKEFVRGQAFARWHRNKKDNTKGRPYITGTLLRSAVIRSAENLLTLSDGKISEKTCCPGKFDTEDKDRLLQLRQRSTLRWTDKNPCPDNAETYCPFCELLGRSGNDGKKAEKKDWRFRIHFGNLSLPGKPDFDGPKAIGSQRVLNRVDFKSGKAHDFFKAYEVDHTRFPRFEGEITIDNKVSAEARKLLCDSLKFTDRLCGALCVIRFDEYTPAADSGKQTENVQAEPNANLAEKTAEQIISILDDNKKTRYTRLLADAIRSLRRSSKLVAGLPKDHDGKDDHYLWDIGKKKKDENSVTIRQILTTSADTKELKNAGKWREFCEKLGEALYLKSKDMSGGLKITRRILGDAEFHGKPDRLEKSRSVSIGSVLKETVVCGELVAKTPFFFGAIDEDAKQTDLQVLLTPDNKYRLPRSAVRGILRRDLQTYFDSPCNAELGGRPCMCKTCRIMRGITVMDARSEYNAPPEIRHRTRINPFTGTVAEGALFNMEVAPEGIVFPFQLRYRGSEDGLPDALKTVLKWWAEGQAFMSGAASTGKGRFRMENAKYETLDLSDENQRNDYLKNWGWRDEKGLEELKKRLNSGLPEPGNYRDPKWHEINVSIEMASPFINGDPIRAAVDKRGTDVVTFVKYKAEGEEAKPVCAYKAESFRGVIRSAVARIHMEDGVPLTELTHSDCECLLCQIFGSEYEAGKIRFEDLVFESDPEPVTFDHVAIDRFTGGAADKKKFDDSPLPGSPARPLMLKGSFWIRRDVLEDEEYCKALGKALADVNNGLYPLGGKSAIGYGQVKSLGIKGDDKRISRLMNPAFDETDVAVPEKPKTDAEVRIEAEKVYYPHYFVEPHKKVEREEKPCGHQKFHEGRLTGKIRCKLITKTPLIVPDTSNDDFFRPADKEARKEKDEYHKSYAFFRLHKQIMIPGSELRGMVSSVYETVTNSCFRIFDETKRLSWRMDADHQNVLQKFLPGRVTADGKHIQKFSGGGSRTVDDRMIGKRMSADLRPCHGDWVEDGDLSALNAYPEKRLLLRHPKGLCPACRLFGTGSYKGRVRFGFASLENDPEWLIPGKNPGDPFHGGPVMLSLLERPRPTWSIPGSDNKFKVPGRKFYVHHHAWKTIKDGNHPTTGKAIEQSPNNRTVEALAGGNSFSFEIAFENLKEWELGLLIHSLQLEKGLAHKLGMAKSMGFGSVEIDVESVRLRKDWKQWRNGNSEIPNWLGKGFAKLKEWFRDELDFIENLKKLLWFPEGDQAPRVCYPMLRKKDDPNGNSGYEELKRGEFKKEDRQKKLTTPWTPWAKRTADGSEFESPKKKRKV

SEQ ID NO: 490 - protein, 1354 aa, synthetic construct; identical to SEQ ID NO: 196

SEQ ID NO: 491 - protein, 1637 aa, synthetic construct; identical to SEQ ID NO: 195

SEQ ID NO: 492 - protein, 1762 aa, synthetic construct
MKRTADGSEFESPKKKRKVTTTMKISIEFLEPFRMTKWQESTRRNKNNKEFVRGQAFARWHRNKKDNTKGRPYITGTLLRSAVIRSAENLLTLSDGKISEKTCCPGKFDTEDKDRLLQLRQRSTLRWTDKNPCPDNAETYCPFCELLGRSGNDGKKAEKKDWRFRIHFGNLSLPGKPDFDGPKAIGSQRVLNRVDFKSGKAHDFFKAYEVDHTRFPRFEGEITIDNKVSAEARKLLCDSLKFTDRLCGALCVIRFDEYTPAADSGKQTENVQAEPNANLAEKTAEQIISILDDNKKTEYTRLLADAIRSLRRSSKLVAGLPKDHDGKDDHYLWDIGKKKKDENSVTIRQILTTSADTKELKNAGKWREFCEKLGEALYLKSKDMSGGLKITRRILGDAEFHGKPDRLEKSRSVSIGSVLKETVVCGELVAKTPFFFGAIDEDAKQTDLQVLLTPDNKYRLPRSAVRGILRRDLQTYFDSPCNAELGGRPCMCKTCRIMRGITVMDARSEYNAPPEIRHRTRINPFTGTVAEGALFNMEVAPEGIVFPFQLRYRGSEDGLPDALKTVLKWWAEGQAFMSGAASTGKGRFRMENAKYETLDLSDENQRNDYLKNWGWRDEKGLEELKKRLNSGLPEPGNYRDPKWHEINVSIEMASPFINGDPIRAAVDKRGTDVVTFVKYKAEGEEAKPVCAYKAESFRGVIRSAVARIHMEDGVPLTELTHSDCECLLCQIFGSEYEAGKIRFEDLVFESDPEPVTFDHVAIDRFTGGAADKKKFDDSPLPGSPARPLMLKGSFWIRRDVLEDEEYCKALGKALADVNNGLYPLGGKSAIGYGQVKSLGIKGDDKRISRLMNPAFDETDVAVPEKPKTDAEVRIEAEKVYYPHYFVEPHKKVEREEKPCGHQKFHEGRLTGKIRCKLITKTPLIVPDTSNDDFFRPADKEARKEKDEYHKSYAFFRLHKQIMIPGSELRGMVSSVYETVTNSCFRIFDETKRLSWRMDADHQNVLQDFLPGRVTADGKHIQKFSETARVPFYDKTQKHFDILDEQEIAGEKPVRMWVKRFIKRLSLVDPAKHPQKKQDNKWKRRKEGIATFIEQKNGSYYFNVVTNNGCTSFHLWHKPDNFDQEKLEGIQNGEKLDCWVRDSRYQKAFQEIPENDPDGWECKEGYLHVVGPSKVEFSDKKGDVINNFQGTLPSVPNDWKTIRTNDFKNRKRKNEPVFCCEDDKGNYYTMAKYCETFFFDLKENEEYEIPEKARIKYKELLRVYNNNPQAVPESVFQSRVARENVEKLKSGDLVYFKHNEKYVEDIVPVRISRTVDDRMIGKRMSADLRPCHGDWVEDGDLSALNAYPEKRLLLRHPKGLCPACRLFGTGSYKGRVRFGFASLENDPEWLIPGKNPGDPFHGGPVMLSLLERPRPTWSIPGSDNKFKVPGRKFYVHHHAWKTIKDGNHPTTGKAIEQSPNNRTVEALAGGNSFSFEIAFENLKEWELGLLIHSLQLEKGLAHKLGMAKSMGFGSVEIDVESVRLRKDWKQWRNGNSEIPNWLGKGFAKLKEWFRDELDFIENLKKLLWFPEGDQAPRVCYPMLRKKDDPNGNSGYEELKDGEFKKEDRQKKLTTPWTPWAMAMQAAKRANIRLPPEVNRILYIRNLPYKITAEEMYDIFGKYGPIRQIRVGNTPETRGTAYVVYEDIFDAKNACDHLSGFNVCNRYLVVLYYNANRAFQKMDTKKKEEQLKLLKEKYGINTDPPKKRTADGSEFESPKKKRKV

SEQ ID NO: 493 - protein, 2112 aa, synthetic construct
MKRTADGSEFESPKKKRKVTTTMKISIEFLEPFRMTKWQESTRRNKNNKEFVRGQAFARWHRNKKDNTKGRPYITGTLLRSAVIRSAENLLTLSDGKISEKTCCPGKFDTEDKDRLLQLRQRSTLRWTDKNPCPDNAETYCPFCELLGRSGNDGKKAEKKDWRFRIHFGNLSLPGKPDFDGPKAIGSQRVLNRVDFKSGKAHDFFKAYEVDHTRFPRFEGEITIDNKVSAEARKLLCDSLKFTDRLCGALCVIRFDEYTPAADSGKQTENVQAEPNANLAEKTAEQIISILDDNKKTEYTRLLADAIRSLRRSSKLVAGLPKDHDGKDDHYLWDIGKKKKDENSVTIRQILTTSADTKELKNAGKWREFCEKLGEALYLKSKDMSGGLKITRRILGDAEFHGKPDRLEKSRSVSIGSVLKETVVCGELVAKTPFFFGAIDEDAKQTDLQVLLTPDNKYRLPRSAVRGILRRDLQTYFDSPCNAELGGRPCMCKTCRIMRGITVMDARSEYNAPPEIRHRTRINPFTGTVAEGALFNMEVAPEGIVFPFQLRYRGSEDGLPDALKTVLKWWAEGQAFMSGAASTGKGRFRMENAKYETLDLSDENQRNDYLKNWGWRDEKGLEELKKRLNSGLPEPGNYRDPKWHEINVSIEMASPFINGDPIRAAVDKRGTDVVTFVKYKAEGEEAKPVCAYKAESFRGVIRSAVARIHMEDGVPLTELTHSDCECLLCQIFGSEYEAGKIRFEDLVFESDPEPVTFDHVAIDRFTGGAADKKKFDDSPLPGSPARPLMLKGSFWIRRDVLEDEEYCKALGKALADVNNGLYPLGGKSAIGYGQVKSLGIKGDDKRISRLMNPAFDETDVAVPEKPKTDAEVRIEAEKVYYPHYFVEPHKKVEREEKPCGHQKFHEGRLTGKIRCKLITKTPLIVPDTSNDDFFRPADKEARKEKDEYHKSYAFFRLHKQIMIPGSELRGMVSSVYETVTNSCFRIFDETKRLSWRMDADHQNVLQDFLPGRVTADGKHIQKFSETARVPFYDKTQKHFDILDEQEIAGEKPVRMWVKRFIKRLSLVDPAKHPQKKQDNKWKRRKEGIATFIEQKNGSYYFNVVTNNGCTSFHLWHKPDNFDQEKLEGIQNGEKLDCWVRDSRYQKAFQEIPENDPDGWECKEGYLHVVGPSKVEFSDKKGDVINNFQGTLPSVPNDWKTIRTNDFKNRKRKNEPVFCCEDDKGNYYTMAKYCETFFFDLKENEEYEIPEKARIKYKELLRVYNNNPQAVPESVFQSRVARENVEKLKSGDLVYFKHNEKYVEDIVPVRISRTVDDRMIGKRMSADLRPCHGDWVEDGDLSALNAYPEKRLLLRHPKGLCPACRLFGTGSYKGRVRFGFASLENDPEWLIPGKNPGDPFHGGPVMLSLLERPRPTWSIPGSDNKFKVPGRKFYVHHHAWKTIKDGNHPTTGKAIEQSPNNRTVEALAGGNSFSFEIAFENLKEWELGLLIHSLQLEKGLAHKLGMAKSMGFGSVEIDVESVRLRKDWKQWRNGNSEIPNWLGKGFAKLKEWFRDELDFIENLKKLLWFPEGDQAPRVCYPMLRKKDDPNGNSGYEELKDGEFKKEDRQKKLTTPWTPWAMSDFDEFERQLNENKQERDKENRHRKRSHSRSRSRDRKRRSRSRDRRNRDQRSASRDRRRRSKPLTRGAKEEHGGLIRSPRHEKKKKVRKYWDVPPPGFEHITPMQYKAMQAAGQIPATALLPTMTPDGLAVTPTPVPVVGSQMTRQARRLYVGNIPFGITEEAMMDFFNAQMRLGGLTQAPGNPVLAVQINQDKNFAFLEFRSVDETTQAMAFDGIIFQGQSLKIRRPHDYQPLPGMSENPSVYVPGVVSTVVPDSAHKLFIGGLPNYLNDDQVKELLTSFGPLKAFNLVKDSATGLSKGYAFCEYVDINVTDQAIAGLNGMQLGDKKLLVQRASVGAKNATLVSPPSTINQTPVTLQVPGLMSSQVQMGGHPTEVLCLMNMVLPEELLDDEEYEEIVEDVRDECSKYGLVKSIEIPRPVDGVEVPGCGKIFVEFTSVFDCQKAMQGLTGRKFANRVVVTKYCDPDSYHRRDFWKRTADGSEFESPKKKRKV

SEQ ID NO: 494 - protein, 1762 aa, synthetic construct
MKRTADGSEFESPKKKRKVTTTMKISIEFLEPFRMTKWQESTRRNKNNKEFVRGQAFARWHRNKKDNTKGRPYITGTLLRSAVIRSAENLLTLSDGKISEKTCCPGKFDTEDKDRLLQLRQRSTLRWTDKNPCPDNAETYCPFCELLGRSGNDGKKAEKKDWRFRIHFGNLSLPGKPDFDGPKAIGSQRVLNRVDFKSGKAHDFFKAYEVDHTRFPRFEGEITIDNKVSAEARKLLCDSLKFTDRLCGALCVIRFDEYTPAADSGKQTENVQAEPNANLAEKTAEQIISILDDNKKTEYTRLLADAIRSLRRSSKLVAGLPKDHDGKDDHYLWDIGKKKKDENSVTIRQILTTSADTKELKNAGKWREFCEKLGEALYLKSKDMSGGLKITRRILGDAEFHGKPDRLEKSRSVSIGSVLKETVVCGELVAKTPFFFGAIDEDAKQTDLQVLLTPDNKYRLPRSAVRGILRRDLQTYFDSPCNAELGGRPCMCKTCRIMRGITVMDARSEYNAPPEIRHRTRINPFTGTVAEGALFNMEVAPEGIVFPFQLRYRGSEDGLPDALKTVLKWWAEGQAFMSGAASTGKGRFRMENAKYETLDLSDENQRNDYLKNWGWRDEKGLEELKKRLNSGLPEPGNYRDPKWHEINVSIEMASPFINGDPIRAAVDKRGTDVVTFVKYKAEGEEAKPVCAYKAESFRGVIRSAVARIHMEDGVPLTELTHSDCECLLCQIFGSEYEAGKIRFEDLVFESDPEPVTFDHVAIDRFTGGAADKKKFDDSPLPGSPARPLMLKGSFWIRRDVLEDEEYCKALGKALADVNNGLYPLGGKSAIGYGQVKSLGIKGDDKRISRLMNPAFDETDVAVPEKPKTDAEVRIEAEKVYYPHYFVEPHKKVEREEKPCGHQKFHEGRLTGKIRCKLITKTPLIVPDTSNDDFFRPADKEARKEKDEYHKSYAFFRLHKQIMIPGSELRGMVSSVYETVTNSCFRIFDETKRLSWRMDADHQNVLQKFLPGRVTADGKHIQKFSETARVPFYDKTQKHFDILDEQEIAGEKPVRMWVKRFIKRLSLVDPAKHPQKKQDNKWKRRKEGIATFIEQKNGSYYFNVVTNNGCTSFHLWHKPDNFDQEKLEGIQNGEKLDCWVRDSRYQKAFQEIPENDPDGWECKEGYLHVVGPSKVEFSDKKGDVINNFQGTLPSVPNDWKTIRTNDFKNRKRKNEPVFCCEDDKGNYYTMAKYCETFFFDLKENEEYEIPEKARIKYKELLRVYNNNPQAVPESVFQSRVARENVEKLKSGDLVYFKHNEKYVEDIVPVRISRTVDDRMIGKRMSADLRPCHGDWVEDGDLSALNAYPEKRLLLRHPKGLCPACRLFGTGSYKGRVRFGFASLENDPEWLIPGKNPGDPFHGGPVMLSLLERPRPTWSIPGSDNKFKVPGRKFYVHHHAWKTIKDGNHPTTGKAIEQSPNNRTVEALAGGNSFSFEIAFENLKEWELGLLIHSLQLEKGLAHKLGMAKSMGFGSVEIDVESVRLRKDWKQWRNGNSEIPNWLGKGFAKLKEWFRDELDFIENLKKLLWFPEGDQAPRVCYPMLRKKDDPNGNSGYEELKRGEFKKEDRQKKLTTPWTPWAMAMQAAKRANIRLPPEVNRILYIRNLPYKITAEEMYDIFGKYGPIRQIRVGNTPETRGTAYVVYEDIFDAKNACDHLSGFNVCNRYLVVLYYNANRAFQKMDTKKKEEQLKLLKEKYGINTDPPKKRTADGSEFESPKKKRKV

SEQ ID NO: 495 - protein, 2112 aa, synthetic construct
MKRTADGSEFESPKKKRKVTTTMKISIEFLEPFRMTKWQESTRRNKNNKEFVRGQAFARWHRNKKDNTKGRPYITGTLLRSAVIRSAENLLTLSDGKISEKTCCPGKFDTEDKDRLLQLRQRSTLRWTDKNPCPDNAETYCPFCELLGRSGNDGKKAEKKDWRFRIHFGNLSLPGKPDFDGPKAIGSQRVLNRVDFKSGKAHDFFKAYEVDHTRFPRFEGEITIDNKVSAEARKLLCDSLKFTDRLCGALCVIRFDEYTPAADSGKQTENVQAEPNANLAEKTAEQIISILDDNKKTEYTRLLADAIRSLRRSSKLVAGLPKDHDGKDDHYLWDIGKKKKDENSVTIRQILTTSADTKELKNAGKWREFCEKLGEALYLKSKDMSGGLKITRRILGDAEFHGKPDRLEKSRSVSIGSVLKETVVCGELVAKTPFFFGAIDEDAKQTDLQVLLTPDNKYRLPRSAVRGILRRDLQTYFDSPCNAELGGRPCMCKTCRIMRGITVMDARSEYNAPPEIRHRTRINPFTGTVAEGALFNMEVAPEGIVFPFQLRYRGSEDGLPDALKTVLKWWAEGQAFMSGAASTGKGRFRMENAKYETLDLSDENQRNDYLKNWGWRDEKGLEELKKRLNSGLPEPGNYRDPKWHEINVSIEMASPFINGDPIRAAVDKRGTDVVTFVKYKAEGEEAKPVCAYKAESFRGVIRSAVARIHMEDGVPLTELTHSDCECLLCQIFGSEYEAGKIRFEDLVFESDPEPVTFDHVAIDRFTGGAADKKKFDDSPLPGSPARPLMLKGSFWIRRDVLEDEEYCKALGKALADVNNGLYPLGGKSAIGYGQVKSLGIKGDDKRISRLMNPAFDETDVAVPEKPKTDAEVRIEAEKVYYPHYFVEPHKKVEREEKPCGHQKFHEGRLTGKIRCKLITKTPLIVPDTSNDDFFRPADKEARKEKDEYHKSYAFFRLHKQIMIPGSELRGMVSSVYETVTNSCFRIFDETKRLSWRMDADHQNVLQKFLPGRVTADGKHIQKFSETARVPFYDKTQKHFDILDEQEIAGEKPVRMWVKRFIKRLSLVDPAKHPQKKQDNKWKRRKEGIATFIEQKNGSYYFNVVTNNGCTSFHLWHKPDNFDQEKLEGIQNGEKLDCWVRDSRYQKAFQEIPENDPDGWECKEGYLHVVGPSKVEFSDKKGDVINNFQGTLPSVPNDWKTIRTNDFKNRKRKNEPVFCCEDDKGNYYTMAKYCETFFFDLKENEEYEIPEKARIKYKELLRVYNNNPQAVPESVFQSRVARENVEKLKSGDLVYFKHNEKYVEDIVPVRISRTVDDRMIGKRMSADLRPCHGDWVEDGDLSALNAYPEKRLLLRHPKGLCPACRLFGTGSYKGRVRFGFASLENDPEWLIPGKNPGDPFHGGPVMLSLLERPRPTWSIPGSDNKFKVPGRKFYVHHHAWKTIKDGNHPTTGKAIEQSPNNRTVEALAGGNSFSFEIAFENLKEWELGLLIHSLQLEKGLAHKLGMAKSMGFGSVEIDVESVRLRKDWKQWRNGNSEIPNWLGKGFAKLKEWFRDELDFIENLKKLLWFPEGDQAPRVCYPMLRKKDDPNGNSGYEELKRGEFKKEDRQKKLTTPWTPWAMSDFDEFERQLNENKQERDKENRHRKRSHSRSRSRDRKRRSRSRDRRNRDQRSASRDRRRRSKPLTRGAKEEHGGLIRSPRHEKKKKVRKYWDVPPPGFEHITPMQYKAMQAAGQIPATALLPTMTPDGLAVTPTPVPVVGSQMTRQARRLYVGNIPFGITEEAMMDFFNAQMRLGGLTQAPGNPVLAVQINQDKNFAFLEFRSVDETTQAMAFDGIIFQGQSLKIRRPHDYQPLPGMSENPSVYVPGVVSTVVPDSAHKLFIGGLPNYLNDDQVKELLTSFGPLKAFNLVKDSATGLSKGYAFCEYVDINVTDQAIAGLNGMQLGDKKLLVQRASVGAKNATLVSPPSTINQTPVTLQVPGLMSSQVQMGGHPTEVLCLMNMVLPEELLDDEEYEEIVEDVRDECSKYGLVKSIEIPRPVDGVEVPGCGKIFVEFTSVFDCQKAMQGLTGRKFANRVVVTKYCDPDSYHRRDFWKRTADGSEFESPKKKRKV

SEQ ID NO: 496 - protein, 1762 aa, synthetic construct
MKRTADGSEFESPKKKRKVTTTMKISIEFLEPFRMTKWQESTRRNKNNKEFVRGQAFARWHRNKKDNTKGRPYITGTLLRSAVIRSAENLLTLSDGKISEKTCCPGKFDTEDKDRLLQLRQRSTLRWTDKNPCPDNAETYCPFCELLGRSGNDGKKAEKKDWRFRIHFGNLSLPGKPDFDGPKAIGSQRVLNRVDFKSGKAHDFFKAYEVDHTRFPRFEGEITIDNKVSAEARKLLCDSLKFTDRLCGALCVIRFDEYTPAADSGKQTENVQAEPNANLAEKTAEQIISILDDNKKTEYTRLLADAIRSLRRSSKLVAGLPKDHDGKDDHYLWDIGKKKKDENSVTIRQILTTSADTKELKNAGKWREFCEKLGEALYLKSKDMSGGLKITRRILGDAEFHGKPDRLEKSRSVSIGSVLKETVVCGELVAKTPFFFGAIDEDAKQTDLQVLLTPDNKYRLPRSAVRGILRRDLQTYFDSPCNAELGGRPCMCKTCRIMRGITVMDARSEYNAPPEIRHRTRINPFTGTVAEGALFNMEVAPEGIVFPFQLRYRGSEDGLPDALKTVLKWWAEGQAFMSGAASTGKGRFRMENAKYETLDLSDENQRNDYLKNWGWRDEKGLEELKKRLNSGLPEPGNYRDPKWHEINVSIEMASPFINGDPIRAAVDKRGTDVVTFVKYKAEGEEAKPVCAYKAESFRGVIRSAVARIHMEDGVPLTELTHSDCECLLCQIFGSEYEAGKIRFEDLVFESDPEPVTFDHVAIDRFTGGAADKKKFDDSPLPGSPARPLMLKGSFWIRRDVLEDEEYCKALGKALADVNNGLYPLGGKSAIGYGQVKSLGIKGDDKRISRLMNPAFDETDVAVPEKPKTDAEVRIEAEKVYYPHYFVEPHKKVEREEKPCGHQKFHEGRLTGKIRCKLITKTPLIVPDTSNDDFFRPADKEARKEKDEYHKSYAFFRLHKQIMIPGSELRGMVSSVYETVTNSCFRIFDETKRLSWRMDAKHQNVLQKFLPGRVTADGKHIQKFSETARVPFYDKTQKHFDILDEQEIAGEKPVRMWVKRFIKRLSLVDPAKHPQKKQDNKWKRRKEGIATFIEQKNGSYYFNVVTNNGCTSFHLWHKPDNFDQEKLEGIQNGEKLDCWVRDSRYQKAFQEIPENDPDGWECKEGYLHVVGPSKVEFSDKKGDVINNFQGTLPSVPNDWKTIRTNDFKNRKRKNEPVFCCEDDKGNYYTMAKYCETFFFDLKENEEYEIPEKARIKYKELLRVYNNNPQAVPESVFQSRVARENVEKLKSGDLVYFKHNEKYVEDIVPVRISRTVDDRMIGKRMSADLRPCHGDWVEDGDLSALNAYPEKRLLLRHPKGLCPACRLFGTGSYKGRVRFGFASLENDPEWLIPGKNPGDPFHGGPVMLSLLERPRPTWSIPGSDNKFKVPGRKFYVHHHAWKTIKDGNHPTTGKAIEQSPNNRTVEALAGGNSFSFEIAFENLKEWELGLLIHSLQLEKGLAHKLGMAKSMGFGSVEIDVESVRLRKDWKQWRNGNSEIPNWLGKGFAKLKEWFRDELDFIENLKKLLWFPEGDQAPRVCYPMLRKKDDPNGNSGYEELKRGEFKKEDRQKKLTTPWTPWAMAMQAAKRANIRLPPEVNRILYIRNLPYKITAEEMYDIFGKYGPIRQIRVGNTPETRGTAYVVYEDIFDAKNACDHLSGFNVCNRYLVVLYYNANRAFQKMDTKKKEEQLKLLKEKYGINTDPPKKRTADGSEFESPKKKRKV

SEQ ID NO: 497 - protein, 2112 aa, synthetic construct
MKRTADGSEFESPKKKRKVTTTMKISIEFLEPFRMTKWQESTRRNKNNKEFVRGQAFARWHRNKKDNTKGRPYITGTLLRSAVIRSAENLLTLSDGKISEKTCCPGKFDTEDKDRLLQLRQRSTLRWTDKNPCPDNAETYCPFCELLGRSGNDGKKAEKKDWRFRIHFGNLSLPGKPDFDGPKAIGSQRVLNRVDFKSGKAHDFFKAYEVDHTRFPRFEGEITIDNKVSAEARKLLCDSLKFTDRLCGALCVIRFDEYTPAADSGKQTENVQAEPNANLAEKTAEQIISILDDNKKTEYTRLLADAIRSLRRSSKLVAGLPKDHDGKDDHYLWDIGKKKKDENSVTIRQILTTSADTKELKNAGKWREFCEKLGEALYLKSKDMSGGLKITRRILGDAEFHGKPDRLEKSRSVSIGSVLKETVVCGELVAKTPFFFGAIDEDAKQTDLQVLLTPDNKYRLPRSAVRGILRRDLQTYFDSPCNAELGGRPCMCKTCRIMRGITVMDARSEYNAPPEIRHRTRINPFTGTVAEGALFNMEVAPEGIVFPFQLRYRGSEDGLPDALKTVLKWWAEGQAFMSGAASTGKGRFRMENAKYETLDLSDENQRNDYLKNWGWRDEKGLEELKKRLNSGLPEPGNYRDPKWHEINVSIEMASPFINGDPIRAAVDKRGTDVVTFVKYKAEGEEAKPVCAYKAESFRGVIRSAVARIHMEDGVPLTELTHSDCECLLCQIFGSEYEAGKIRFEDLVFESDPEPVTFDHVAIDRFTGGAADKKKFDDSPLPGSPARPLMLKGSFWIRRDVLEDEEYCKALGKALADVNNGLYPLGGKSAIGYGQVKSLGIKGDDKRISRLMNPAFDETDVAVPEKPKTDAEVRIEAEKVYYPHYFVEPHKKVEREEKPCGHQKFHEGRLTGKIRCKLITKTPLIVPDTSNDDFFRPADKEARKEKDEYHKSYAFFRLHKQIMIPGSELRGMVSSVYETVTNSCFRIFDETKRLSWRMDAKHQNVLQKFLPGRVTADGKHIQKFSETARVPFYDKTQKHFDILDEQEIAGEKPVRMWVKRFIKRLSLVDPAKHPQKKQDNKWKRRKEGIATFIEQKNGSYYFNVVTNNGCTSFHLWHKPDNFDQEKLEGIQNGEKLDCWVRDSRYQKAFQEIPENDPDGWECKEGYLHVVGPSKVEFSDKKGDVINNFQGTLPSVPNDWKTIRTNDFKNRKRKNEPVFCCEDDKGNYYTMAKYCETFFFDLKENEEYEIPEKARIKYKELLRVYNNNPQAVPESVFQSRVARENVEKLKSGDLVYFKHNEKYVEDIVPVRISRTVDDRMIGKRMSADLRPCHGDWVEDGDLSALNAYPEKRLLLRHPKGLCPACRLFGTGSYKGRVRFGFASLENDPEWLIPGKNPGDPFHGGPVMLSLLERPRPTWSIPGSDNKFKVPGRKFYVHHHAWKTIKDGNHPTTGKAIEQSPNNRTVEALAGGNSFSFEIAFENLKEWELGLLIHSLQLEKGLAHKLGMAKSMGFGSVEIDVESVRLRKDWKQWRNGNSEIPNWLGKGFAKLKEWFRDELDFIENLKKLLWFPEGDQAPRVCYPMLRKKDDPNGNSGYEELKRGEFKKEDRQKKLTTPWTPWAMSDFDEFERQLNENKQERDKENRHRKRSHSRSRSRDRKRRSRSRDRRNRDQRSASRDRRRRSKPLTRGAKEEHGGLIRSPRHEKKKKVRKYWDVPPPGFEHITPMQYKAMQAAGQIPATALLPTMTPDGLAVTPTPVPVVGSQMTRQARRLYVGNIPFGITEEAMMDFFNAQMRLGGLTQAPGNPVLAVQINQDKNFAFLEFRSVDETTQAMAFDGIIFQGQSLKIRRPHDYQPLPGMSENPSVYVPGVVSTVVPDSAHKLFIGGLPNYLNDDQVKELLTSFGPLKAFNLVKDSATGLSKGYAFCEYVDINVTDQAIAGLNGMQLGDKKLLVQRASVGAKNATLVSPPSTINQTPVTLQVPGLMSSQVQMGGHPTEVLCLMNMVLPEELLDDEEYEEIVEDVRDECSKYGLVKSIEIPRPVDGVEVPGCGKIFVEFTSVFDCQKAMQGLTGRKFANRVVVTKYCDPDSYHRRDFWKRTADGSEFESPKKKRKV

SEQ ID NO: 498 - protein, 2038 aa, synthetic construct
MKRTADGSEFESPKKKRKVMSLYDDLGVETSDSKTEGWSKNFKLLQSQLQVKKAALTQAKSQRTKQSTVLAPVIDLKRGGSSDDRQIVDTPPHVAAGLKDPVPSGFSAGEVLIPLADEYDPMFPNDYEKVVKRQREERQRQRELERQKEIEEREKRRKDRHEASGFARRPDPDSDEDEDYERERRKRSMGGAAIAPPTSLVEKDKELPRDFPYEEDSRPRSQSSKAAIPPPVYEEQDRPRSPTGPSNSFLANMGGTVAHKIMQKYGFREGQGLGKHEQGLSTALSVEKTSKRGGKIIVGDATEKDASKKSDSNPLTEILKCPTKVVLLRNMVGAGEVDEDLEVETKEECEKYGKVGKCVIFEIPGAPDDEAVRIFLEFERVESAIKAVVDLNGRYFGGRVVKACFYNLDKFRVLDLAEQVTTTMKISIEFLEPFRMTKWQESTRRNKNNKEFVRGQAFARWHRNKKDNTKGRPYITGTLLRSAVIRSAENLLTLSDGKISEKTCCPGKFDTEDKDRLLQLRQRSTLRWTDKNPCPDNAETYCPFCELLGRSGNDGKKAEKKDWRFRIHFGNLSLPGKPDFDGPKAIGSQRVLNRVDFKSGKAHDFFKAYEVDHTRFPRFEGEITIDNKVSAEARKLLCDSLKFTDRLCGALCVIRFDEYTPAADSGKQTENVQAEPNANLAEKTAEQIISILDDNKKTEYTRLLADAIRSLRRSSKLVAGLPKDHDGKDDHYLWDIGKKKKDENSVTIRQILTTSADTKELKNAGKWREFCEKLGEALYLKSKDMSGGLKITRRILGDAEFHGKPDRLEKSRSVSIGSVLKETVVCGELVAKTPFFFGAIDEDAKQTDLQVLLTPDNKYRLPRSAVRGILRRDLQTYFDSPCNAELGGRPCMCKTCRIMRGITVMDARSEYNAPPEIRHRTRINPFTGTVAEGALFNMEVAPEGIVFPFQLRYRGSEDGLPDALKTVLKWWAEGQAFMSGAASTGKGRFRMENAKYETLDLSDENQRNDYLKNWGWRDEKGLEELKKRLNSGLPEPGNYRDPKWHEINVSIEMASPFINGDPIRAAVDKRGTDVVTFVKYKAEGEEAKPVCAYKAESFRGVIRSAVARIHMEDGVPLTELTHSDCECLLCQIFGSEYEAGKIRFEDLVFESDPEPVTFDHVAIDRFTGGAADKKKFDDSPLPGSPARPLMLKGSFWIRRDVLEDEEYCKALGKALADVNNGLYPLGGKSAIGYGQVKSLGIKGDDKRISRLMNPAFDETDVAVPEKPKTDAEVRIEAEKVYYPHYFVEPHKKVEREEKPCGHQKFHEGRLTGKIRCKLITKTPLIVPDTSNDDFFRPADKEARKEKDEYHKSYAFFRLHKQIMIPGSELRGMVSSVYETVTNSCFRIFDETKRLSWRMDADHQNVLQDFLPGRVTADGKHIQKFSETARVPFYDKTQKHFDILDEQEIAGEKPVRMWVKRFIKRLSLVDPAKHPQKKQDNKWKRRKEGIATFIEQKNGSYYFNVVTNNGCTSFHLWHKPDNFDQEKLEGIQNGEKLDCWVRDSRYQKAFQEIPENDPDGWECKEGYLHVVGPSKVEFSDKKGDVINNFQGTLPSVPNDWKTIRTNDFKNRKRKNEPVFCCEDDKGNYYTMAKYCETFFFDLKENEEYEIPEKARIKYKELLRVYNNNPQAVPESVFQSRVARENVEKLKSGDLVYFKHNEKYVEDIVPVRISRTVDDRMIGKRMSADLRPCHGDWVEDGDLSALNAYPEKRLLLRHPKGLCPACRLFGTGSYKGRVRFGFASLENDPEWLIPGKNPGDPFHGGPVMLSLLERPRPTWSIPGSDNKFKVPGRKFYVHHHAWKTIKDGNHPTTGKAIEQSPNNRTVEALAGGNSFSFEIAFENLKEWELGLLIHSLQLEKGLAHKLGMAKSMGFGSVEIDVESVRLRKDWKQWRNGNSEIPNWLGKGFAKLKEWFRDELDFIENLKKLLWFPEGDQAPRVCYPMLRKKDDPNGNSGYEELKDGEFKKEDRQKKLTTPWTPWAKRTADGSEFESPKKKRKV

SEQ ID NO: 499 - protein, 2038 aa, synthetic construct
MKRTADGSEFESPKKKRKVTTTMKISIEFLEPFRMTKWQESTRRNKNNKEFVRGQAFARWHRNKKDNTKGRPYITGTLLRSAVIRSAENLLTLSDGKISEKTCCPGKFDTEDKDRLLQLRQRSTLRWTDKNPCPDNAETYCPFCELLGRSGNDGKKAEKKDWRFRIHFGNLSLPGKPDFDGPKAIGSQRVLNRVDFKSGKAHDFFKAYEVDHTRFPRFEGEITIDNKVSAEARKLLCDSLKFTDRLCGALCVIRFDEYTPAADSGKQTENVQAEPNANLAEKTAEQIISILDDNKKTEYTRLLADAIRSLRRSSKLVAGLPKDHDGKDDHYLWDIGKKKKDENSVTIRQILTTSADTKELKNAGKWREFCEKLGEALYLKSKDMSGGLKITRRILGDAEFHGKPDRLEKSRSVSIGSVLKETVVCGELVAKTPFFFGAIDEDAKQTDLQVLLTPDNKYRLPRSAVRGILRRDLQTYFDSPCNAELGGRPCMCKTCRIMRGITVMDARSEYNAPPEIRHRTRINPFTGTVAEGALFNMEVAPEGIVFPFQLRYRGSEDGLPDALKTVLKWWAEGQAFMSGAASTGKGRFRMENAKYETLDLSDENQRNDYLKNWGWRDEKGLEELKKRLNSGLPEPGNYRDPKWHEINVSIEMASPFINGDPIRAAVDKRGTDVVTFVKYKAEGEEAKPVCAYKAESFRGVIRSAVARIHMEDGVPLTELTHSDCECLLCQIFGSEYEAGKIRFEDLVFESDPEPVTFDHVAIDRFTGGAADKKKFDDSPLPGSPARPLMLKGSFWIRRDVLEDEEYCKALGKALADVNNGLYPLGGKSAIGYGQVKSLGIKGDDKRISRLMNPAFDETDVAVPEKPKTDAEVRIEAEKVYYPHYFVEPHKKVEREEKPCGHQKFHEGRLTGKIRCKLITKTPLIVPDTSNDDFFRPADKEARKEKDEYHKSYAFFRLHKQIMIPGSELRGMVSSVYETVTNSCFRIFDETKRLSWRMDADHQNVLQDFLPGRVTADGKHIQKFSETARVPFYDKTQKHFDILDEQEIAGEKPVRMWVKRFIKRLSLVDPAKHPQKKQDNKWKRRKEGIATFIEQKNGSYYFNVVTNNGCTSFHLWHKPDNFDQEKLEGIQNGEKLDCWVRDSRYQKAFQEIPENDPDGWECKEGYLHVVGPSKVEFSDKKGDVINNFQGTLPSVPNDWKTIRTNDFKNRKRKNEPVFCCEDDKGNYYTMAKYCETFFFDLKENEEYEIPEKARIKYKELLRVYNNNPQAVPESVFQSRVARENVEKLKSGDLVYFKHNEKYVEDIVPVRISRTVDDRMIGKRMSADLRPCHGDWVEDGDLSALNAYPEKRLLLRHPKGLCPACRLFGTGSYKGRVRFGFASLENDPEWLIPGKNPGDPFHGGPVMLSLLERPRPTWSIPGSDNKFKVPGRKFYVHHHAWKTIKDGNHPTTGKAIEQSPNNRTVEALAGGNSFSFEIAFENLKEWELGLLIHSLQLEKGLAHKLGMAKSMGFGSVEIDVESVRLRKDWKQWRNGNSEIPNWLGKGFAKLKEWFRDELDFIENLKKLLWFPEGDQAPRVCYPMLRKKDDPNGNSGYEELKDGEFKKEDRQKKLTTPWTPWAMSLYDDLGVETSDSKTEGWSKNFKLLQSQLQVKKAALTQAKSQRTKQSTVLAPVIDLKRGGSSDDRQIVDTPPHVAAGLKDPVPSGFSAGEVLIPLADEYDPMFPNDYEKVVKRQREERQRQRELERQKEIEEREKRRKDRHEASGFARRPDPDSDEDEDYERERRKRSMGGAAIAPPTSLVEKDKELPRDFPYEEDSRPRSQSSKAAIPPPVYEEQDRPRSPTGPSNSFLANMGGTVAHKIMQKYGFREGQGLGKHEQGLSTALSVEKTSKRGGKIIVGDATEKDASKKSDSNPLTEILKCPTKVVLLRNMVGAGEVDEDLEVETKEECEKYGKVGKCVIFEIPGAPDDEAVRIFLEFERVESAIKAVVDLNGRYFGGRVVKACFYNLDKFRVLDLAEQVKRTADGSEFESPKKKRKV

SEQ ID NO: 500 - protein, 2053 aa, synthetic construct
MKRTADGSEFESPKKKRKVTTTMKISIEFLEPFRMTKWQESTRRNKNNKEFVRGQAFARWHRNKKDNTKGRPYITGTLLRSAVIRSAENLLTLSDGKISEKTCCPGKFDTEDKDRLLQLRQRSTLRWTDKNPCPDNAETYCPFCELLGRSGNDGKKAEKKDWRFRIHFGNLSLPGKPDFDGPKAIGSQRVLNRVDFKSGKAHDFFKAYEVDHTRFPRFEGEITIDNKVSAEARKLLCDSLKFTDRLCGALCVIRFDEYTPAADSGKQTENVQAEPNANLAEKTAEQIISILDDNKKTEYTRLLADAIRSLRRSSKLVAGLPKDHDGKDDHYLWDIGKKKKDENSVTIRQILTTSADTKELKNAGKWREFCEKLGEALYLKSKDMSGGLKITRRILGDAEFHGKPDRLEKSRSVSIGSVLKETVVCGELVAKTPFFFGAIDEDAKQTDLQVLLTPDNKYRLPRSAVRGILRRDLQTYFDSPCNAELGGRPCMCKTCRIMRGITVMDARSEYNAPPEIRHRTRINPFTGTVAEGALFNMEVAPEGIVFPFQLRYRGSEDGLPDALKTVLKWWAEGQAFMSGAASTGKGRFRMENAKYETLDLSDENQRNDYLKNWGWRDEKGLEELKKRLNSGLPEPGNYRDPKWHEINVSIEMASPFINGDPIRAAVDKRGTDVVTFVKYKAEGEEAKPVCAYKAESFRGVIRSAVARIHMEDGVPLTELTHSDCECLLCQIFGSEYEAGKIRFEDLVFESDPEPVTFDHVAIDRFTGGAADKKKFDDSPLPGSPARPLMLKGSFWIRRDVLEDEEYCKALGKALADVNNGLYPLGGKSAIGYGQVKSLGIKGDDKRISRLMNPAFDETDVAVPEKPKTDAEVRIEAEKVYYPHYFVEPHKKVEREEKPCGHQKFHEGRLTGKIRCKLITKTPLIVPDTSNDDFFRPADKEARKEKDEYHKSYAFFRLHKQIMIPGSELRGMVSSVYETVTNSCFRIFDETKRLSWRMDADHQNVLQDFLPGRVTADGKHIQKFSETARVPFYDKTQKHFDILDEQEIAGEKPVRMWVKRFIKRLSLVDPAKHPQKKQDNKWKRRKEGIATFIEQKNGSYYFNVVTNNGCTSFHLWHKPDNFDQEKLEGIQNGEKLDCWVRDSRYQKAFQEIPENDPDGWECKEGYLHVVGPSKVEFSDKKGDVINNFQGTLPSVPNDWKTIRTNDFKNRKRKNEPVFCCEDDKGNYYTMAKYCETFFFDLKENEEYEIPEKARIKYKELLRVYNNNPQAVPESVFQSRVARENVEKLKSGDLVYFKHNEKYVEDIVPVRISRTVDDRMIGKRMSADLRPCHGDWVEDGDLSALNAYPEKRLLLRHPKGLCPACRLFGTGSYKGRVRFGFASLENDPEWLIPGKNPGDPFHGGPVMLSLLERPRPTWSIPGSDNKFKVPGRKFYVHHHAWKTIKDGNHPTTGKAIEQSPNNRTVEALAGGNSFSFEIAFENLKEWELGLLIHSLQLEKGLAHKLGMAKSMGFGSVEIDVESVRLRKDWKQWRNGNSEIPNWLGKGFAKLKEWFRDELDFIENLKKLLWFPEGDQAPRVCYPMLRKKDDPNGNSGYEELKDGEFKKEDRQKKLTTPWTPWASGSETPGTSESATPESSLYDDLGVETSDSKTEGWSKNFKLLQSQLQVKKAALTQAKSQRTKQSTVLAPVIDLKRGGSSDDRQIVDTPPHVAAGLKDPVPSGFSAGEVLIPLADEYDPMFPNDYEKVVKRQREERQRQRELERQKEIEEREKRRKDRHEASGFARRPDPDSDEDEDYERERRKRSMGGAAIAPPTSLVEKDKELPRDFPYEEDSRPRSQSSKAAIPPPVYEEQDRPRSPTGPSNSFLANMGGTVAHKIMQKYGFREGQGLGKHEQGLSTALSVEKTSKRGGKIIVGDATEKDASKKSDSNPLTEILKCPTKVVLLRNMVGAGEVDEDLEVETKEECEKYGKVGKCVIFEIPGAPDDEAVRIFLEFERVESAIKAVVDLNGRYFGGRVVKACFYNLDKFRVLDLAEQVKRTADGSEFESPKKKRKV

SEQ ID NO: 501 - protein, 1762 aa, synthetic construct
MKRTADGSEFESPKKKRKVMAMQAAKRANIRLPPEVNRILYIRNLPYKITAEEMYDIFGKYGPIRQIRVGNTPETRGTAYVVYEDIFDAKNACDHLSGFNVCNRYLVVLYYNANRAFQKMDTKKKEEQLKLLKEKYGINTDPPKTTTMKISIEFLEPFRMTKWQESTRRNKNNKEFVRGQAFARWHRNKKDNTKGRPYITGTLLRSAVIRSAENLLTLSDGKISEKTCCPGKFDTEDKDRLLQLRQRSTLRWTDKNPCPDNAETYCPFCELLGRSGNDGKKAEKKDWRFRIHFGNLSLPGKPDFDGPKAIGSQRVLNRVDFKSGKAHDFFKAYEVDHTRFPRFEGEITIDNKVSAEARKLLCDSLKFTDRLCGALCVIRFDEYTPAADSGKQTENVQAEPNANLAEKTAEQIISILDDNKKTEYTRLLADAIRSLRRSSKLVAGLPKDHDGKDDHYLWDIGKKKKDENSVTIRQILTTSADTKELKNAGKWREFCEKLGEALYLKSKDMSGGLKITRRILGDAEFHGKPDRLEKSRSVSIGSVLKETVVCGELVAKTPFFFGAIDEDAKQTDLQVLLTPDNKYRLPRSAVRGILRRDLQTYFDSPCNAELGGRPCMCKTCRIMRGITVMDARSEYNAPPEIRHRTRINPFTGTVAEGALFNMEVAPEGIVFPFQLRYRGSEDGLPDALKTVLKWWAEGQAFMSGAASTGKGRFRMENAKYETLDLSDENQRNDYLKNWGWRDEKGLEELKKRLNSGLPEPGNYRDPKWHEINVSIEMASPFINGDPIRAAVDKRGTDVVTFVKYKAEGEEAKPVCAYKAESFRGVIRSAVARIHMEDGVPLTELTHSDCECLLCQIFGSEYEAGKIRFEDLVFESDPEPVTFDHVAIDRFTGGAADKKKFDDSPLPGSPARPLMLKGSFWIRRDVLEDEEYCKALGKALADVNNGLYPLGGKSAIGYGQVKSLGIKGDDKRISRLMNPAFDETDVAVPEKPKTDAEVRIEAEKVYYPHYFVEPHKKVEREEKPCGHQKFHEGRLTGKIRCKLITKTPLIVPDTSNDDFFRPADKEARKEKDEYHKSYAFFRLHKQIMIPGSELRGMVSSVYETVTNSCFRIFDETKRLSWRMDADHQNVLQDFLPGRVTADGKHIQKFSETARVPFYDKTQKHFDILDEQEIAGEKPVRMWVKRFIKRLSLVDPAKHPQKKQDNKWKRRKEGIATFIEQKNGSYYFNVVTNNGCTSFHLWHKPDNFDQEKLEGIQNGEKLDCWVRDSRYQKAFQEIPENDPDGWECKEGYLHVVGPSKVEFSDKKGDVINNFQGTLPSVPNDWKTIRTNDFKNRKRKNEPVFCCEDDKGNYYTMAKYCETFFFDLKENEEYEIPEKARIKYKELLRVYNNNPQAVPESVFQSRVARENVEKLKSGDLVYFKHNEKYVEDIVPVRISRTVDDRMIGKRMSADLRPCHGDWVEDGDLSALNAYPEKRLLLRHPKGLCPACRLFGTGSYKGRVRFGFASLENDPEWLIPGKNPGDPFHGGPVMLSLLERPRPTWSIPGSDNKFKVPGRKFYVHHHAWKTIKDGNHPTTGKAIEQSPNNRTVEALAGGNSFSFEIAFENLKEWELGLLIHSLQLEKGLAHKLGMAKSMGFGSVEIDVESVRLRKDWKQWRNGNSEIPNWLGKGFAKLKEWFRDELDFIENLKKLLWFPEGDQAPRVCYPMLRKKDDPNGNSGYEELKDGEFKKEDRQKKLTTPWTPWAKRTADGSEFESPKKKRKV

SEQ ID NO: 502 - protein, 1777 aa, synthetic construct
MKRTADGSEFESPKKKRKVTTTMKISIEFLEPFRMTKWQESTRRNKNNKEFVRGQAFARWHRNKKDNTKGRPYITGTLLRSAVIRSAENLLTLSDGKISEKTCCPGKFDTEDKDRLLQLRQRSTLRWTDKNPCPDNAETYCPFCELLGRSGNDGKKAEKKDWRFRIHFGNLSLPGKPDFDGPKAIGSQRVLNRVDFKSGKAHDFFKAYEVDHTRFPRFEGEITIDNKVSAEARKLLCDSLKFTDRLCGALCVIRFDEYTPAADSGKQTENVQAEPNANLAEKTAEQIISILDDNKKTEYTRLLADAIRSLRRSSKLVAGLPKDHDGKDDHYLWDIGKKKKDENSVTIRQILTTSADTKELKNAGKWREFCEKLGEALYLKSKDMSGGLKITRRILGDAEFHGKPDRLEKSRSVSIGSVLKETVVCGELVAKTPFFFGAIDEDAKQTDLQVLLTPDNKYRLPRSAVRGILRRDLQTYFDSPCNAELGGRPCMCKTCRIMRGITVMDARSEYNAPPEIRHRTRINPFTGTVAEGALFNMEVAPEGIVFPFQLRYRGSEDGLPDALKTVLKWWAEGQAFMSGAASTGKGRFRMENAKYETLDLSDENQRNDYLKNWGWRDEKGLEELKKRLNSGLPEPGNYRDPKWHEINVSIEMASPFINGDPIRAAVDKRGTDVVTFVKYKAEGEEAKPVCAYKAESFRGVIRSAVARIHMEDGVPLTELTHSDCECLLCQIFGSEYEAGKIRFEDLVFESDPEPVTFDHVAIDRFTGGAADKKKFDDSPLPGSPARPLMLKGSFWIRRDVLEDEEYCKALGKALADVNNGLYPLGGKSAIGYGQVKSLGIKGDDKRISRLMNPAFDETDVAVPEKPKTDAEVRIEAEKVYYPHYFVEPHKKVEREEKPCGHQKFHEGRLTGKIRCKLITKTPLIVPDTSNDDFFRPADKEARKEKDEYHKSYAFFRLHKQIMIPGSELRGMVSSVYETVTNSCFRIFDETKRLSWRMDADHQNVLQDFLPGRVTADGKHIQKFSETARVPFYDKTQKHFDILDEQEIAGEKPVRMWVKRFIKRLSLVDPAKHPQKKQDNKWKRRKEGIATFIEQKNGSYYFNVVTNNGCTSFHLWHKPDNFDQEKLEGIQNGEKLDCWVRDSRYQKAFQEIPENDPDGWECKEGYLHVVGPSKVEFSDKKGDVINNFQGTLPSVPNDWKTIRTNDFKNRKRKNEPVFCCEDDKGNYYTMAKYCETFFFDLKENEEYEIPEKARIKYKELLRVYNNNPQAVPESVFQSRVARENVEKLKSGDLVYFKHNEKYVEDIVPVRISRTVDDRMIGKRMSADLRPCHGDWVEDGDLSALNAYPEKRLLLRHPKGLCPACRLFGTGSYKGRVRFGFASLENDPEWLIPGKNPGDPFHGGPVMLSLLERPRPTWSIPGSDNKFKVPGRKFYVHHHAWKTIKDGNHPTTGKAIEQSPNNRTVEALAGGNSFSFEIAFENLKEWELGLLIHSLQLEKGLAHKLGMAKSMGFGSVEIDVESVRLRKDWKQWRNGNSEIPNWLGKGFAKLKEWFRDELDFIENLKKLLWFPEGDQAPRVCYPMLRKKDDPNGNSGYEELKDGEFKKEDRQKKLTTPWTPWASGSETPGTSESATPESAMQAAKRANIRLPPEVNRILYIRNLPYKITAEEMYDIFGKYGPIRQIRVGNTPETRGTAYVVYEDIFDAKNACDHLSGFNVCNRYLVVLYYNANRAFQKMDTKKKEEQLKLLKEKYGINTDPPKKRTADGSEFESPKKKRKV

SEQ ID NO: 503 - protein, 1877 aa, synthetic construct
MKRTADGSEFESPKKKRKVMAEYLASIFGTEKDKVNCSFYFKIGACRHGDRCSRLHNKPTFSQTIALLNIYRNPQNSSQSADGLRCAVSDVEMQEHYDEFFEEVFTEMEEKYGEVEEMNVCDNLGDHLVGNVYVKFRREEDAEKAVIDLNNRWFNGQPIHAELSPVTDFREACCRQYEMGECTRGGFCNFMHLKPISRELRRELYGRRRKKHRSRSRSRERRSRSRDRGRGGGGGGGGGGGGRERDRRRSRDRERSGRFTTTMKISIEFLEPFRMTKWQESTRRNKNNKEFVRGQAFARWHRNKKDNTKGRPYITGTLLRSAVIRSAENLLTLSDGKISEKTCCPGKFDTEDKDRLLQLRQRSTLRWTDKNPCPDNAETYCPFCELLGRSGNDGKKAEKKDWRFRIHFGNLSLPGKPDFDGPKAIGSQRVLNRVDFKSGKAHDFFKAYEVDHTRFPRFEGEITIDNKVSAEARKLLCDSLKFTDRLCGALCVIRFDEYTPAADSGKQTENVQAEPNANLAEKTAEQIISILDDNKKTEYTRLLADAIRSLRRSSKLVAGLPKDHDGKDDHYLWDIGKKKKDENSVTIRQILTTSADTKELKNAGKWREFCEKLGEALYLKSKDMSGGLKITRRILGDAEFHGKPDRLEKSRSVSIGSVLKETVVCGELVAKTPFFFGAIDEDAKQTDLQVLLTPDNKYRLPRSAVRGILRRDLQTYFDSPCNAELGGRPCMCKTCRIMRGITVMDARSEYNAPPEIRHRTRINPFTGTVAEGALFNMEVAPEGIVFPFQLRYRGSEDGLPDALKTVLKWWAEGQAFMSGAASTGKGRFRMENAKYETLDLSDENQRNDYLKNWGWRDEKGLEELKKRLNSGLPEPGNYRDPKWHEINVSIEMASPFINGDPIRAAVDKRGTDVVTFVKYKAEGEEAKPVCAYKAESFRGVIRSAVARIHMEDGVPLTELTHSDCECLLCQIFGSEYEAGKIRFEDLVFESDPEPVTFDHVAIDRFTGGAADKKKFDDSPLPGSPARPLMLKGSFWIRRDVLEDEEYCKALGKALADVNNGLYPLGGKSAIGYGQVKSLGIKGDDKRISRLMNPAFDETDVAVPEKPKTDAEVRIEAEKVYYPHYFVEPHKKVEREEKPCGHQKFHEGRLTGKIRCKLITKTPLIVPDTSNDDFFRPADKEARKEKDEYHKSYAFFRLHKQIMIPGSELRGMVSSVYETVTNSCFRIFDETKRLSWRMDADHQNVLQDFLPGRVTADGKHIQKFSETARVPFYDKTQKHFDILDEQEIAGEKPVRMWVKRFIKRLSLVDPAKHPQKKQDNKWKRRKEGIATFIEQKNGSYYFNVVTNNGCTSFHLWHKPDNFDQEKLEGIQNGEKLDCWVRDSRYQKAFQEIPENDPDGWECKEGYLHVVGPSKVEFSDKKGDVINNFQGTLPSVPNDWKTIRTNDFKNRKRKNEPVFCCEDDKGNYYTMAKYCETFFFDLKENEEYEIPEKARIKYKELLRVYNNNPQAVPESVFQSRVARENVEKLKSGDLVYFKHNEKYVEDIVPVRISRTVDDRMIGKRMSADLRPCHGDWVEDGDLSALNAYPEKRLLLRHPKGLCPACRLFGTGSYKGRVRFGFASLENDPEWLIPGKNPGDPFHGGPVMLSLLERPRPTWSIPGSDNKFKVPGRKFYVHHHAWKTIKDGNHPTTGKAIEQSPNNRTVEALAGGNSFSFEIAFENLKEWELGLLIHSLQLEKGLAHKLGMAKSMGFGSVEIDVESVRLRKDWKQWRNGNSEIPNWLGKGFAKLKEWFRDELDFIENLKKLLWFPEGDQAPRVCYPMLRKKDDPNGNSGYEELKDGEFKKEDRQKKLTTPWTPWAKRTADGSEFESPKKKRKV

SEQ ID NO: 504 - protein, 1877 aa, synthetic construct
MKRTADGSEFESPKKKRKVTTTMKISIEFLEPFRMTKWQESTRRNKNNKEFVRGQAFARWHRNKKDNTKGRPYITGTLLRSAVIRSAENLLTLSDGKISEKTCCPGKFDTEDKDRLLQLRQRSTLRWTDKNPCPDNAETYCPFCELLGRSGNDGKKAEKKDWRFRIHFGNLSLPGKPDFDGPKAIGSQRVLNRVDFKSGKAHDFFKAYEVDHTRFPRFEGEITIDNKVSAEARKLLCDSLKFTDRLCGALCVIRFDEYTPAADSGKQTENVQAEPNANLAEKTAEQIISILDDNKKTEYTRLLADAIRSLRRSSKLVAGLPKDHDGKDDHYLWDIGKKKKDENSVTIRQILTTSADTKELKNAGKWREFCEKLGEALYLKSKDMSGGLKITRRILGDAEFHGKPDRLEKSRSVSIGSVLKETVVCGELVAKTPFFFGAIDEDAKQTDLQVLLTPDNKYRLPRSAVRGILRRDLQTYFDSPCNAELGGRPCMCKTCRIMRGITVMDARSEYNAPPEIRHRTRINPFTGTVAEGALFNMEVAPEGIVFPFQLRYRGSEDGLPDALKTVLKWWAEGQAFMSGAASTGKGRFRMENAKYETLDLSDENQRNDYLKNWGWRDEKGLEELKKRLNSGLPEPGNYRDPKWHEINVSIEMASPFINGDPIRAAVDKRGTDVVTFVKYKAEGEEAKPVCAYKAESFRGVIRSAVARIHMEDGVPLTELTHSDCECLLCQIFGSEYEAGKIRFEDLVFESDPEPVTFDHVAIDRFTGGAADKKKFDDSPLPGSPARPLMLKGSFWIRRDVLEDEEYCKALGKALADVNNGLYPLGGKSAIGYGQVKSLGIKGDDKRISRLMNPAFDETDVAVPEKPKTDAEVRIEAEKVYYPHYFVEPHKKVEREEKPCGHQKFHEGRLTGKIRCKLITKTPLIVPDTSNDDFFRPADKEARKEKDEYHKSYAFFRLHKQIMIPGSELRGMVSSVYETVTNSCFRIFDETKRLSWRMDADHQNVLQDFLPGRVTADGKHIQKFSETARVPFYDKTQKHFDILDEQEIAGEKPVRMWVKRFIKRLSLVDPAKHPQKKQDNKWKRRKEGIATFIEQKNGSYYFNVVTNNGCTSFHLWHKPDNFDQEKLEGIQNGEKLDCWVRDSRYQKAFQEIPENDPDGWECKEGYLHVVGPSKVEFSDKKGDVINNFQGTLPSVPNDWKTIRTNDFKNRKRKNEPVFCCEDDKGNYYTMAKYCETFFFDLKENEEYEIPEKARIKYKELLRVYNNNPQAVPESVFQSRVARENVEKLKSGDLVYFKHNEKYVEDIVPVRISRTVDDRMIGKRMSADLRPCHGDWVEDGDLSALNAYPEKRLLLRHPKGLCPACRLFGTGSYKGRVRFGFASLENDPEWLIPGKNPGDPFHGGPVMLSLLERPRPTWSIPGSDNKFKVPGRKFYVHHHAWKTIKDGNHPTTGKAIEQSPNNRTVEALAGGNSFSFEIAFENLKEWELGLLIHSLQLEKGLAHKLGMAKSMGFGSVEIDVESVRLRKDWKQWRNGNSEIPNWLGKGFAKLKEWFRDELDFIENLKKLLWFPEGDQAPRVCYPMLRKKDDPNGNSGYEELKDGEFKKEDRQKKLTTPWTPWAMAEYLASIFGTEKDKVNCSFYFKIGACRHGDRCSRLHNKPTFSQTIALLNIYRNPQNSSQSADGLRCAVSDVEMQEHYDEFFEEVFTEMEEKYGEVEEMNVCDNLGDHLVGNVYVKFRREEDAEKAVIDLNNRWFNGQPIHAELSPVTDFREACCRQYEMGECTRGGFCNFMHLKPISRELRRELYGRRRKKHRSRSRSRERRSRSRDRGRGGGGGGGGGGGGRERDRRRSRDRERSGRFKRTADGSEFESPKKKRKV

SEQ ID NO: 505 - protein, 1892 aa, synthetic construct
MKRTADGSEFESPKKKRKVTTTMKISIEFLEPFRMTKWQESTRRNKNNKEFVRGQAFARWHRNKKDNTKGRPYITGTLLRSAVIRSAENLLTLSDGKISEKTCCPGKFDTEDKDRLLQLRQRSTLRWTDKNPCPDNAETYCPFCELLGRSGNDGKKAEKKDWRFRIHFGNLSLPGKPDFDGPKAIGSQRVLNRVDFKSGKAHDFFKAYEVDHTRFPRFEGEITIDNKVSAEARKLLCDSLKFTDRLCGALCVIRFDEYTPAADSGKQTENVQAEPNANLAEKTAEQIISILDDNKKTEYTRLLADAIRSLRRSSKLVAGLPKDHDGKDDHYLWDIGKKKKDENSVTIRQILTTSADTKELKNAGKWREFCEKLGEALYLKSKDMSGGLKITRRILGDAEFHGKPDRLEKSRSVSIGSVLKETVVCGELVAKTPFFFGAIDEDAKQTDLQVLLTPDNKYRLPRSAVRGILRRDLQTYFDSPCNAELGGRPCMCKTCRIMRGITVMDARSEYNAPPEIRHRTRINPFTGTVAEGALFNMEVAPEGIVFPFQLRYRGSEDGLPDALKTVLKWWAEGQAFMSGAASTGKGRFRMENAKYETLDLSDENQRNDYLKNWGWRDEKGLEELKKRLNSGLPEPGNYRDPKWHEINVSIEMASPFINGDPIRAAVDKRGTDVVTFVKYKAEGEEAKPVCAYKAESFRGVIRSAVARIHMEDGVPLTELTHSDCECLLCQIFGSEYEAGKIRFEDLVFESDPEPVTFDHVAIDRFTGGAADKKKFDDSPLPGSPARPLMLKGSFWIRRDVLEDEEYCKALGKALADVNNGLYPLGGKSAIGYGQVKSLGIKGDDKRISRLMNPAFDETDVAVPEKPKTDAEVRIEAEKVYYPHYFVEPHKKVEREEKPCGHQKFHEGRLTGKIRCKLITKTPLIVPDTSNDDFFRPADKEARKEKDEYHKSYAFFRLHKQIMIPGSELRGMVSSVYETVTNSCFRIFDETKRLSWRMDADHQNVLQDFLPGRVTADGKHIQKFSETARVPFYDKTQKHFDILDEQEIAGEKPVRMWVKRFIKRLSLVDPAKHPQKKQDNKWKRRKEGIATFIEQKNGSYYFNVVTNNGCTSFHLWHKPDNFDQEKLEGIQNGEKLDCWVRDSRYQKAFQEIPENDPDGWECKEGYLHVVGPSKVEFSDKKGDVINNFQGTLPSVPNDWKTIRTNDFKNRKRKNEPVFCCEDDKGNYYTMAKYCETFFFDLKENEEYEIPEKARIKYKELLRVYNNNPQAVPESVFQSRVARENVEKLKSGDLVYFKHNEKYVEDIVPVRISRTVDDRMIGKRMSADLRPCHGDWVEDGDLSALNAYPEKRLLLRHPKGLCPACRLFGTGSYKGRVRFGFASLENDPEWLIPGKNPGDPFHGGPVMLSLLERPRPTWSIPGSDNKFKVPGRKFYVHHHAWKTIKDGNHPTTGKAIEQSPNNRTVEALAGGNSFSFEIAFENLKEWELGLLIHSLQLEKGLAHKLGMAKSMGFGSVEIDVESVRLRKDWKQWRNGNSEIPNWLGKGFAKLKEWFRDELDFIENLKKLLWFPEGDQAPRVCYPMLRKKDDPNGNSGYEELKDGEFKKEDRQKKLTTPWTPWASGSETPGTSESATPESAEYLASIFGTEKDKVNCSFYFKIGACRHGDRCSRLHNKPTFSQTIALLNIYRNPQNSSQSADGLRCAVSDVEMQEHYDEFFEEVFTEMEEKYGEVEEMNVCDNLGDHLVGNVYVKFRREEDAEKAVIDLNNRWFNGQPIHAELSPVTDFREACCRQYEMGECTRGGFCNFMHLKPISRELRRELYGRRRKKHRSRSRSRERRSRSRDRGRGGGGGGGGGGGGRERDRRRSRDRERSGRFKRTADGSEFESPKKKRKV

SEQ ID NO: 506 - protein, 2127 aa, synthetic construct
MKRTADGSEFESPKKKRKVTTTMKISIEFLEPFRMTKWQESTRRNKNNKEFVRGQAFARWHRNKKDNTKGRPYITGTLLRSAVIRSAENLLTLSDGKISEKTCCPGKFDTEDKDRLLQLRQRSTLRWTDKNPCPDNAETYCPFCELLGRSGNDGKKAEKKDWRFRIHFGNLSLPGKPDFDGPKAIGSQRVLNRVDFKSGKAHDFFKAYEVDHTRFPRFEGEITIDNKVSAEARKLLCDSLKFTDRLCGALCVIRFDEYTPAADSGKQTENVQAEPNANLAEKTAEQIISILDDNKKTEYTRLLADAIRSLRRSSKLVAGLPKDHDGKDDHYLWDIGKKKKDENSVTIRQILTTSADTKELKNAGKWREFCEKLGEALYLKSKDMSGGLKITRRILGDAEFHGKPDRLEKSRSVSIGSVLKETVVCGELVAKTPFFFGAIDEDAKQTDLQVLLTPDNKYRLPRSAVRGILRRDLQTYFDSPCNAELGGRPCMCKTCRIMRGITVMDARSEYNAPPEIRHRTRINPFTGTVAEGALFNMEVAPEGIVFPFQLRYRGSEDGLPDALKTVLKWWAEGQAFMSGAASTGKGRFRMENAKYETLDLSDENQRNDYLKNWGWRDEKGLEELKKRLNSGLPEPGNYRDPKWHEINVSIEMASPFINGDPIRAAVDKRGTDVVTFVKYKAEGEEAKPVCAYKAESFRGVIRSAVARIHMEDGVPLTELTHSDCECLLCQIFGSEYEAGKIRFEDLVFESDPEPVTFDHVAIDRFTGGAADKKKFDDSPLPGSPARPLMLKGSFWIRRDVLEDEEYCKALGKALADVNNGLYPLGGKSAIGYGQVKSLGIKGDDKRISRLMNPAFDETDVAVPEKPKTDAEVRIEAEKVYYPHYFVEPHKKVEREEKPCGHQKFHEGRLTGKIRCKLITKTPLIVPDTSNDDFFRPADKEARKEKDEYHKSYAFFRLHKQIMIPGSELRGMVSSVYETVTNSCFRIFDETKRLSWRMDADHQNVLQDFLPGRVTADGKHIQKFSETARVPFYDKTQKHFDILDEQEIAGEKPVRMWVKRFIKRLSLVDPAKHPQKKQDNKWKRRKEGIATFIEQKNGSYYFNVVTNNGCTSFHLWHKPDNFDQEKLEGIQNGEKLDCWVRDSRYQKAFQEIPENDPDGWECKEGYLHVVGPSKVEFSDKKGDVINNFQGTLPSVPNDWKTIRTNDFKNRKRKNEPVFCCEDDKGNYYTMAKYCETFFFDLKENEEYEIPEKARIKYKELLRVYNNNPQAVPESVFQSRVARENVEKLKSGDLVYFKHNEKYVEDIVPVRISRTVDDRMIGKRMSADLRPCHGDWVEDGDLSALNAYPEKRLLLRHPKGLCPACRLFGTGSYKGRVRFGFASLENDPEWLIPGKNPGDPFHGGPVMLSLLERPRPTWSIPGSDNKFKVPGRKFYVHHHAWKTIKDGNHPTTGKAIEQSPNNRTVEALAGGNSFSFEIAFENLKEWELGLLIHSLQLEKGLAHKLGMAKSMGFGSVEIDVESVRLRKDWKQWRNGNSEIPNWLGKGFAKLKEWFRDELDFIENLKKLLWFPEGDQAPRVCYPMLRKKDDPNGNSGYEELKDGEFKKEDRQKKLTTPWTPWASGSETPGTSESATPESSDFDEFERQLNENKQERDKENRHRKRSHSRSRSRDRKRRSRSRDRRNRDQRSASRDRRRRSKPLTRGAKEEHGGLIRSPRHEKKKKVRKYWDVPPPGFEHITPMQYKAMQAAGQIPATALLPTMTPDGLAVTPTPVPVVGSQMTRQARRLYVGNIPFGITEEAMMDFFNAQMRLGGLTQAPGNPVLAVQINQDKNFAFLEFRSVDETTQAMAFDGIIFQGQSLKIRRPHDYQPLPGMSENPSVYVPGVVSTVVPDSAHKLFIGGLPNYLNDDQVKELLTSFGPLKAFNLVKDSATGLSKGYAFCEYVDINVTDQAIAGLNGMQLGDKKLLVQRASVGAKNATLVSPPSTINQTPVTLQVPGLMSSQVQMGGHPTEVLCLMNMVLPEELLDDEEYEEIVEDVRDECSKYGLVKSIEIPRPVDGVEVPGCGKIFVEFTSVFDCQKAMQGLTGRKFANRVVVTKYCDPDSYHRRDFWKRTADGSEFESPKKKRKV

SEQ ID NO: 507 - protein, 2052 aa, synthetic construct
MKRTADGSEFESPKKKRKVTTTMKISIEFLEPFRMTKWQESTRRNKNNKEFVRGQAFARWHRNKKDNTKGRPYITGTLLRSAVIRSAENLLTLSDGKISEKTCCPGKFDTEDKDRLLQLRQRSTLRWTDKNPCPDNAETYCPFCELLGRSGNDGKKAEKKDWRFRIHFGNLSLPGKPDFDGPKAIGSQRVLNRVDFKSGKAHDFFKAYEVDHTRFPRFEGEITIDNKVSAEARKLLCDSLKFTDRLCGALCVIRFDEYTPAADSGKQTENVQAEPNANLAEKTAEQIISILDDNKKTEYTRLLADAIRSLRRSSKLVAGLPKDHDGKDDHYLWDIGKKKKDENSVTIRQILTTSADTKELKNAGKWREFCEKLGEALYLKSKDMSGGLKITRRILGDAEFHGKPDRLEKSRSVSIGSVLKETVVCGELVAKTPFFFGAIDEDAKQTDLQVLLTPDNKYRLPRSAVRGILRRDLQTYFDSPCNAELGGRPCMCKTCRIMRGITVMDARSEYNAPPEIRHRTRINPFTGTVAEGALFNMEVAPEGIVFPFQLRYRGSEDGLPDALKTVLKWWAEGQAFMSGAASTGKGRFRMENAKYETLDLSDENQRNDYLKNWGWRDEKGLEELKKRLNSGLPEPGNYRDPKWHEINVSIEMASPFINGDPIRAAVDKRGTDVVTFVKYKAEGEEAKPVCAYKAESFRGVIRSAVARIHMEDGVPLTELTHSDCECLLCQIFGSEYEAGKIRFEDLVFESDPEPVTFDHVAIDRFTGGAADKKKFDDSPLPGSPARPLMLKGSFWIRRDVLEDEEYCKALGKALADVNNGLYPLGGKSAIGYGQVKSLGIKGDDKRISRLMNPAFDETDVAVPEKPKTDAEVRIEAEKVYYPHYFVEPHKKVEREEKPCGHQKFHEGRLTGKIRCKLITKTPLIVPDTSNDDFFRPADKEARKEKDEYHKSYAFFRLHKQIMIPGSELRGMVSSVYETVTNSCFRIFDETKRLSWRMDADHQNVLQDFLPGRVTADGKHIQKFSETARVPFYDKTQKHFDILDEQEIAGEKPVRMWVKRFIKRLSLVDPAKHPQKKQDNKWKRRKEGIATFIEQKNGSYYFNVVTNNGCTSFHLWHKPDNFDQEKLEGIQNGEKLDCWVRDSRYQKAFQEIPENDPDGWECKEGYLHVVGPSKVEFSDKKGDVINNFQGTLPSVPNDWKTIRTNDFKNRKRKNEPVFCCEDDKGNYYTMAKYCETFFFDLKENEEYEIPEKARIKYKELLRVYNNNPQAVPESVFQSRVARENVEKLKSGDLVYFKHNEKYVEDIVPVRISRTVDDRMIGKRMSADLRPCHGDWVEDGDLSALNAYPEKRLLLRHPKGLCPACRLFGTGSYKGRVRFGFASLENDPEWLIPGKNPGDPFHGGPVMLSLLERPRPTWSIPGSDNKFKVPGRKFYVHHHAWKTIKDGNHPTTGKAIEQSPNNRTVEALAGGNSFSFEIAFENLKEWELGLLIHSLQLEKGLAHKLGMAKSMGFGSVEIDVESVRLRKDWKQWRNGNSEIPNWLGKGFAKLKEWFRDELDFIENLKKLLWFPEGDQAPRVCYPMLRKKDDPNGNSGYEELKDGEFKKEDRQKKLTTPWTPWAGSGGSGSGGSGSGGSSLYDDLGVETSDSKTEGWSKNFKLLQSQLQVKKAALTQAKSQRTKQSTVLAPVIDLKRGGSSDDRQIVDTPPHVAAGLKDPVPSGFSAGEVLIPLADEYDPMFPNDYEKVVKRQREERQRQRELERQKEIEEREKRRKDRHEASGFARRPDPDSDEDEDYERERRKRSMGGAAIAPPTSLVEKDKELPRDFPYEEDSRPRSQSSKAAIPPPVYEEQDRPRSPTGPSNSFLANMGGTVAHKIMQKYGFREGQGLGKHEQGLSTALSVEKTSKRGGKIIVGDATEKDASKKSDSNPLTEILKCPTKVVLLRNMVGAGEVDEDLEVETKEECEKYGKVGKCVIFEIPGAPDDEAVRIFLEFERVESAIKAVVDLNGRYFGGRVVKACFYNLDKFRVLDLAEQVKRTADGSEFESPKKKRKV

SEQ ID NO: 508 - protein, 1776 aa, synthetic construct
MKRTADGSEFESPKKKRKVTTTMKISIEFLEPFRMTKWQESTRRNKNNKEFVRGQAFARWHRNKKDNTKGRPYITGTLLRSAVIRSAENLLTLSDGKISEKTCCPGKFDTEDKDRLLQLRQRSTLRWTDKNPCPDNAETYCPFCELLGRSGNDGKKAEKKDWRFRIHFGNLSLPGKPDFDGPKAIGSQRVLNRVDFKSGKAHDFFKAYEVDHTRFPRFEGEITIDNKVSAEARKLLCDSLKFTDRLCGALCVIRFDEYTPAADSGKQTENVQAEPNANLAEKTAEQIISILDDNKKTEYTRLLADAIRSLRRSSKLVAGLPKDHDGKDDHYLWDIGKKKKDENSVTIRQILTTSADTKELKNAGKWREFCEKLGEALYLKSKDMSGGLKITRRILGDAEFHGKPDRLEKSRSVSIGSVLKETVVCGELVAKTPFFFGAIDEDAKQTDLQVLLTPDNKYRLPRSAVRGILRRDLQTYFDSPCNAELGGRPCMCKTCRIMRGITVMDARSEYNAPPEIRHRTRINPFTGTVAEGALFNMEVAPEGIVFPFQLRYRGSEDGLPDALKTVLKWWAEGQAFMSGAASTGKGRFRMENAKYETLDLSDENQRNDYLKNWGWRDEKGLEELKKRLNSGLPEPGNYRDPKWHEINVSIEMASPFINGDPIRAAVDKRGTDVVTFVKYKAEGEEAKPVCAYKAESFRGVIRSAVARIHMEDGVPLTELTHSDCECLLCQIFGSEYEAGKIRFEDLVFESDPEPVTFDHVAIDRFTGGAADKKKFDDSPLPGSPARPLMLKGSFWIRRDVLEDEEYCKALGKALADVNNGLYPLGGKSAIGYGQVKSLGIKGDDKRISRLMNPAFDETDVAVPEKPKTDAEVRIEAEKVYYPHYFVEPHKKVEREEKPCGHQKFHEGRLTGKIRCKLITKTPLIVPDTSNDDFFRPADKEARKEKDEYHKSYAFFRLHKQIMIPGSELRGMVSSVYETVTNSCFRIFDETKRLSWRMDADHQNVLQDFLPGRVTADGKHIQKFSETARVPFYDKTQKHFDILDEQEIAGEKPVRMWVKRFIKRLSLVDPAKHPQKKQDNKWKRRKEGIATFIEQKNGSYYFNVVTNNGCTSFHLWHKPDNFDQEKLEGIQNGEKLDCWVRDSRYQKAFQEIPENDPDGWECKEGYLHVVGPSKVEFSDKKGDVINNFQGTLPSVPNDWKTIRTNDFKNRKRKNEPVFCCEDDKGNYYTMAKYCETFFFDLKENEEYEIPEKARIKYKELLRVYNNNPQAVPESVFQSRVARENVEKLKSGDLVYFKHNEKYVEDIVPVRISRTVDDRMIGKRMSADLRPCHGDWVEDGDLSALNAYPEKRLLLRHPKGLCPACRLFGTGSYKGRVRFGFASLENDPEWLIPGKNPGDPFHGGPVMLSLLERPRPTWSIPGSDNKFKVPGRKFYVHHHAWKTIKDGNHPTTGKAIEQSPNNRTVEALAGGNSFSFEIAFENLKEWELGLLIHSLQLEKGLAHKLGMAKSMGFGSVEIDVESVRLRKDWKQWRNGNSEIPNWLGKGFAKLKEWFRDELDFIENLKKLLWFPEGDQAPRVCYPMLRKKDDPNGNSGYEELKDGEFKKEDRQKKLTTPWTPWAGSGGSGSGGSGSGGSAMQAAKRANIRLPPEVNRILYIRNLPYKITAEEMYDIFGKYGPIRQIRVGNTPETRGTAYVVYEDIFDAKNACDHLSGFNVCNRYLVVLYYNANRAFQKMDTKKKEEQLKLLKEKYGINTDPPKKRTADGSEFESPKKKRKV

SEQ ID NO: 509 - protein, 1891 aa, synthetic construct
MKRTADGSEFESPKKKRKVTTTMKISIEFLEPFRMTKWQESTRRNKNNKEFVRGQAFARWHRNKKDNTKGRPYITGTLLRSAVIRSAENLLTLSDGKISEKTCCPGKFDTEDKDRLLQLRQRSTLRWTDKNPCPDNAETYCPFCELLGRSGNDGKKAEKKDWRFRIHFGNLSLPGKPDFDGPKAIGSQRVLNRVDFKSGKAHDFFKAYEVDHTRFPRFEGEITIDNKVSAEARKLLCDSLKFTDRLCGALCVIRFDEYTPAADSGKQTENVQAEPNANLAEKTAEQIISILDDNKKTEYTRLLADAIRSLRRSSKLVAGLPKDHDGKDDHYLWDIGKKKKDENSVTIRQILTTSADTKELKNAGKWREFCEKLGEALYLKSKDMSGGLKITRRILGDAEFHGKPDRLEKSRSVSIGSVLKETVVCGELVAKTPFFFGAIDEDAKQTDLQVLLTPDNKYRLPRSAVRGILRRDLQTYFDSPCNAELGGRPCMCKTCRIMRGITVMDARSEYNAPPEIRHRTRINPFTGTVAEGALFNMEVAPEGIVFPFQLRYRGSEDGLPDALKTVLKWWAEGQAFMSGAASTGKGRFRMENAKYETLDLSDENQRNDYLKNWGWRDEKGLEELKKRLNSGLPEPGNYRDPKWHEINVSIEMASPFINGDPIRAAVDKRGTDVVTFVKYKAEGEEAKPVCAYKAESFRGVIRSAVARIHMEDGVPLTELTHSDCECLLCQIFGSEYEAGKIRFEDLVFESDPEPVTFDHVAIDRFTGGAADKKKFDDSPLPGSPARPLMLKGSFWIRRDVLEDEEYCKALGKALADVNNGLYPLGGKSAIGYGQVKSLGIKGDDKRISRLMNPAFDETDVAVPEKPKTDAEVRIEAEKVYYPHYFVEPHKKVEREEKPCGHQKFHEGRLTGKIRCKLITKTPLIVPDTSNDDFFRPADKEARKEKDEYHKSYAFFRLHKQIMIPGSELRGMVSSVYETVTNSCFRIFDETKRLSWRMDADHQNVLQDFLPGRVTADGKHIQKFSETARVPFYDKTQKHFDILDEQEIAGEKPVRMWVKRFIKRLSLVDPAKHPQKKQDNKWKRRKEGIATFIEQKNGSYYFNVVTNNGCTSFHLWHKPDNFDQEKLEGIQNGEKLDCWVRDSRYQKAFQEIPENDPDGWECKEGYLHVVGPSKVEFSDKKGDVINNFQGTLPSVPNDWKTIRTNDFKNRKRKNEPVFCCEDDKGNYYTMAKYCETFFFDLKENEEYEIPEKARIKYKELLRVYNNNPQAVPESVFQSRVARENVEKLKSGDLVYFKHNEKYVEDIVPVRISRTVDDRMIGKRMSADLRPCHGDWVEDGDLSALNAYPEKRLLLRHPKGLCPACRLFGTGSYKGRVRFGFASLENDPEWLIPGKNPGDPFHGGPVMLSLLERPRPTWSIPGSDNKFKVPGRKFYVHHHAWKTIKDGNHPTTGKAIEQSPNNRTVEALAGGNSFSFEIAFENLKEWELGLLIHSLQLEKGLAHKLGMAKSMGFGSVEIDVESVRLRKDWKQWRNGNSEIPNWLGKGFAKLKEWFRDELDFIENLKKLLWFPEGDQAPRVCYPMLRKKDDPNGNSGYEELKDGEFKKEDRQKKLTTPWTPWAGSGGSGSGGSGSGGSAEYLASIFGTEKDKVNCSFYFKIGACRHGDRCSRLHNKPTFSQTIALLNIYRNPQNSSQSADGLRCAVSDVEMQEHYDEFFEEVFTEMEEKYGEVEEMNVCDNLGDHLVGNVYVKFRREEDAEKAVIDLNNRWFNGQPIHAELSPVTDFREACCRQYEMGECTRGGFCNFMHLKPISRELRRELYGRRRKKHRSRSRSRERRSRSRDRGRGGGGGGGGGGGGRERDRRRSRDRERSGRFKRTADGSEFESPKKKRKV

SEQ ID NO: 510 - protein, 2126 aa, synthetic construct
MKRTADGSEFESPKKKRKVTTTMKISIEFLEPFRMTKWQESTRRNKNNKEFVRGQAFARWHRNKKDNTKGRPYITGTLLRSAVIRSAENLLTLSDGKISEKTCCPGKFDTEDKDRLLQLRQRSTLRWTDKNPCPDNAETYCPFCELLGRSGNDGKKAEKKDWRFRIHFGNLSLPGKPDFDGPKAIGSQRVLNRVDFKSGKAHDFFKAYEVDHTRFPRFEGEITIDNKVSAEARKLLCDSLKFTDRLCGALCVIRFDEYTPAADSGKQTENVQAEPNANLAEKTAEQIISILDDNKKTEYTRLLADAIRSLRRSSKLVAGLPKDHDGKDDHYLWDIGKKKKDENSVTIRQILTTSADTKELKNAGKWREFCEKLGEALYLKSKDMSGGLKITRRILGDAEFHGKPDRLEKSRSVSIGSVLKETVVCGELVAKTPFFFGAIDEDAKQTDLQVLLTPDNKYRLPRSAVRGILRRDLQTYFDSPCNAELGGRPCMCKTCRIMRGITVMDARSEYNAPPEIRHRTRINPFTGTVAEGALFNMEVAPEGIVFPFQLRYRGSEDGLPDALKTVLKWWAEGQAFMSGAASTGKGRFRMENAKYETLDLSDENQRNDYLKNWGWRDEKGLEELKKRLNSGLPEPGNYRDPKWHEINVSIEMASPFINGDPIRAAVDKRGTDVVTFVKYKAEGEEAKPVCAYKAESFRGVIRSAVARIHMEDGVPLTELTHSDCECLLCQIFGSEYEAGKIRFEDLVFESDPEPVTFDHVAIDRFTGGAADKKKFDDSPLPGSPARPLMLKGSFWIRRDVLEDEEYCKALGKALADVNNGLYPLGGKSAIGYGQVKSLGIKGDDKRISRLMNPAFDETDVAVPEKPKTDAEVRIEAEKVYYPHYFVEPHKKVEREEKPCGHQKFHEGRLTGKIRCKLITKTPLIVPDTSNDDFFRPADKEARKEKDEYHKSYAFFRLHKQIMIPGSELRGMVSSVYETVTNSCFRIFDETKRLSWRMDADHQNVLQDFLPGRVTADGKHIQKFSETARVPFYDKTQKHFDILDEQEIAGEKPVRMWVKRFIKRLSLVDPAKHPQKKQDNKWKRRKEGIATFIEQKNGSYYFNVVTNNGCTSFHLWHKPDNFDQEKLEGIQNGEKLDCWVRDSRYQKAFQEIPENDPDGWECKEGYLHVVGPSKVEFSDKKGDVINNFQGTLPSVPNDWKTIRTNDFKNRKRKNEPVFCCEDDKGNYYTMAKYCETFFFDLKENEEYEIPEKARIKYKELLRVYNNNPQAVPESVFQSRVARENVEKLKSGDLVYFKHNEKYVEDIVPVRISRTVDDRMIGKRMSADLRPCHGDWVEDGDLSALNAYPEKRLLLRHPKGLCPACRLFGTGSYKGRVRFGFASLENDPEWLIPGKNPGDPFHGGPVMLSLLERPRPTWSIPGSDNKFKVPGRKFYVHHHAWKTIKDGNHPTTGKAIEQSPNNRTVEALAGGNSFSFEIAFENLKEWELGLLIHSLQLEKGLAHKLGMAKSMGFGSVEIDVESVRLRKDWKQWRNGNSEIPNWLGKGFAKLKEWFRDELDFIENLKKLLWFPEGDQAPRVCYPMLRKKDDPNGNSGYEELKDGEFKKEDRQKKLTTPWTPWAGSGGSGSGGSGSGGSSDFDEFERQLNENKQERDKENRHRKRSHSRSRSRDRKRRSRSRDRRNRDQRSASRDRRRRSKPLTRGAKEEHGGLIRSPRHEKKKKVRKYWDVPPPGFEHITPMQYKAMQAAGQIPATALLPTMTPDGLAVTPTPVPVVGSQMTRQARRLYVGNIPFGITEEAMMDFFNAQMRLGGLTQAPGNPVLAVQINQDKNFAFLEFRSVDETTQAMAFDGIIFQGQSLKIRRPHDYQPLPGMSENPSVYVPGVVSTVVPDSAHKLFIGGLPNYLNDDQVKELLTSFGPLKAFNLVKDSATGLSKGYAFCEYVDINVTDQAIAGLNGMQLGDKKLLVQRASVGAKNATLVSPPSTINQTPVTLQVPGLMSSQVQMGGHPTEVLCLMNMVLPEELLDDEEYEEIVEDVRDECSKYGLVKSIEIPRPVDGVEVPGCGKIFVEFTSVFDCQKAMQGLTGRKFANRVVVTKYCDPDSYHRRDFWKRTADGSEFESPKKKRKV

SEQ ID NO: 511 - protein, 2002 aa, synthetic construct
MKRTADGSEFESPKKKRKVTTTMKISIEFLEPFRMTKWQESTRRNKNNKEFVRGQAFARWHRNKKDNTKGRPYITGTLLRSAVIRSAENLLTLSDGKISEKTCCPGKFDTEDKDRLLQLRQRSTLRWTDKNPCPDNAETYCPFCELLGRSGNDGKKAEKKDWRFRIHFGNLSLPGKPDFDGPKAIGSQRVLNRVDFKSGKAHDFFKAYEVDHTRFPRFEGEITIDNKVSAEARKLLCDSLKFTDRLCGALCVIRFDEYTPAADSGKQTENVQAEPNANLAEKTAEQIISILDDNKKTEYTRLLADAIRSLRRSSKLVAGLPKDHDGKDDHYLWDIGKKKKDENSVTIRQILTTSADTKELKNAGKWREFCEKLGEALYLKSKDMSGGLKITRRILGDAEFHGKPDRLEKSRSVSIGSVLKETVVCGELVAKTPFFFGAIDEDAKQTDLQVLLTPDNKYRLPRSAVRGILRRDLQTYFDSPCNAELGGRPCMCKTCRIMRGITVMDARSEYNAPPEIRHRTRINPFTGTVAEGALFNMEVAPEGIVFPFQLRYRGSEDGLPDALKTVLKWWAEGQAFMSGAASTGKGRFRMENAKYETLDLSDENQRNDYLKNWGWRDEKGLEELKKRLNSGLPEPGNYRDPKWHEINVSIEMASPFINGDPIRAAVDKRGTDVVTFVKYKAEGEEAKPVCAYKAESFRGVIRSAVARIHMEDGVPLTELTHSDCECLLCQIFGSEYEAGKIRFEDLVFESDPEPVTFDHVAIDRFTGGAADKKKFDDSPLPGSPARPLMLKGSFWIRRDVLEDEEYCKALGKALADVNNGLYPLGGKSAIGYGQVKSLGIKGDDKRISRLMNPAFDETDVAVPEKPKTDAEVRIEAEKVYYPHYFVEPHKKVEREEKPCGHQKFHEGRLTGKIRCKLITKTPLIVPDTSNDDFFRPADKEARKEKDEYHKSYAFFRLHKQIMIPGSELRGMVSSVYETVTNSCFRIFDETKRLSWRMDADHQNVLQDFLPGRVTADGKHIQKFSETARVPFYDKTQKHFDILDEQEIAGEKPVRMWVKRFIKRLSLVDPAKHPQKKQDNKWKRRKEGIATFIEQKNGSYYFNVVTNNGCTSFHLWHKPDNFDQEKLEGIQNGEKLDCWVRDSRYQKAFQEIPENDPDGWECKEGYLHVVGPSKVEFSDKKGDVINNFQGTLPSVPNDWKTIRTNDFKNRKRKNEPVFCCEDDKGNYYTMAKYCETFFFDLKENEEYEIPEKARIKYKELLRVYNNNPQAVPESVFQSRVARENVEKLKSGDLVYFKHNEKYVEDIVPVRISRTVDDRMIGKRMSADLRPCHGDWVEDGDLSALNAYPEKRLLLRHPKGLCPACRLFGTGSYKGRVRFGFASLENDPEWLIPGKNPGDPFHGGPVMLSLLERPRPTWSIPGSDNKFKVPGRKFYVHHHAWKTIKDGNHPTTGKAIEQSPNNRTVEALAGGNSFSFEIAFENLKEWELGLLIHSLQLEKGLAHKLGMAKSMGFGSVEIDVESVRLRKDWKQWRNGNSEIPNWLGKGFAKLKEWFRDELDFIENLKKLLWFPEGDQAPRVCYPMLRKKDDPNGNSGYEELKDGEFKKEDRQKKLTTPWTPWAMAMQAAKRANIRLPPEVNRILYIRNLPYKITAEEMYDIFGKYGPIRQIRVGNTPETRGTAYVVYEDIFDAKNACDHLSGFNVCNRYLVVLYYNANRAFQKMDTKKKEEQLKLLKEKYGINTDPPKMAEYLASIFGTEKDKVNCSFYFKIGACRHGDRCSRLHNKPTFSQTIALLNIYRNPQNSSQSADGLRCAVSDVEMQEHYDEFFEEVFTEMEEKYGEVEEMNVCDNLGDHLVGNVYVKFRREEDAEKAVIDLNNRWFNGQPLHAELSPVTDFREACCRQYEMGECTRGGFCNFMHLKPISRELRRELYGRRRKKHRSRSRSRERRSRSRDRGRGGGGGGGGGGGGRERDRRRSRDRERSGRFKRTADGSEFESPKKKRKV

SEQ ID NO: 512 - protein, 2278 aa, synthetic construct
MKRTADGSEFESPKKKRKVTTTMKISIEFLEPFRMTKWQESTRRNKNNKEFVRGQAFARWHRNKKDNTKGRPYITGTLLRSAVIRSAENLLTLSDGKISEKTCCPGKFDTEDKDRLLQLRQRSTLRWTDKNPCPDNAETYCPFCELLGRSGNDGKKAEKKDWRFRIHFGNLSLPGKPDFDGPKAIGSQRVLNRVDFKSGKAHDFFKAYEVDHTRFPRFEGEITIDNKVSAEARKLLCDSLKFTDRLCGALCVIRFDEYTPAADSGKQTENVQAEPNANLAEKTAEQIISILDDNKKTEYTRLLADAIRSLRRSSKLVAGLPKDHDGKDDHYLWDIGKKKKDENSVTIRQILTTSADTKELKNAGKWREFCEKLGEALYLKSKDMSGGLKITRRILGDAEFHGKPDRLEKSRSVSIGSVLKETVVCGELVAKTPFFFGAIDEDAKQTDLQVLLTPDNKYRLPRSAVRGILRRDLQTYFDSPCNAELGGRPCMCKTCRIMRGITVMDARSEYNAPPEIRHRTRINPFTGTVAEGALFNMEVAPEGIVFPFQLRYRGSEDGLPDALKTVLKWWAEGQAFMSGAASTGKGRFRMENAKYETLDLSDENQRNDYLKNWGWRDEKGLEELKKRLNSGLPEPGNYRDPKWHEINVSIEMASPFINGDPIRAAVDKRGTDVVTFVKYKAEGEEAKPVCAYKAESFRGVIRSAVARIHMEDGVPLTELTHSDCECLLCQIFGSEYEAGKIRFEDLVFESDPEPVTFDHVAIDRFTGGAADKKKFDDSPLPGSPARPLMLKGSFWIRRDVLEDEEYCKALGKALADVNNGLYPLGGKSAIGYGQVKSLGIKGDDKRISRLMNPAFDETDVAVPEKPKTDAEVRIEAEKVYYPHYFVEPHKKVEREEKPCGHQKFHEGRLTGKIRCKLITKTPLIVPDTSNDDFFRPADKEARKEKDEYHKSYAFFRLHKQIMIPGSELRGMVSSVYETVTNSCFRIFDETKRLSWRMDADHQNVLQDFLPGRVTADGKHIQKFSETARVPFYDKTQKHFDILDEQEIAGEKPVRMWVKRFIKRLSLVDPAKHPQKKQDNKWKRRKEGIATFIEQKNGSYYFNVVTNNGCTSFHLWHKPDNFDQEKLEGIQNGEKLDCWVRDSRYQKAFQEIPENDPDGWECKEGYLHVVGPSKVEFSDKKGDVINNFQGTLPSVPNDWKTIRTNDFKNRKRKNEPVFCCEDDKGNYYTMAKYCETFFFDLKENEEYEIPEKARIKYKELLRVYNNNPQAVPESVFQSRVARENVEKLKSGDLVYFKHNEKYVEDIVPVRISRTVDDRMIGKRMSADLRPCHGDWVEDGDLSALNAYPEKRLLLRHPKGLCPACRLFGTGSYKGRVRFGFASLENDPEWLIPGKNPGDPFHGGPVMLSLLERPRPTWSIPGSDNKFKVPGRKFYVHHHAWKTIKDGNHPTTGKAIEQSPNNRTVEALAGGNSFSFEIAFENLKEWELGLLIHSLQLEKGLAHKLGMAKSMGFGSVEIDVESVRLRKDWKQWRNGNSEIPNWLGKGFAKLKEWFRDELDFIENLKKLLWFPEGDQAPRVCYPMLRKKDDPNGNSGYEELKDGEFKKEDRQKKLTTPWTPWAMAEYLASIFGTEKDKVNCSFYFKIGACRHGDRCSRLHNKPTFSQTIALLNIYRNPQNSSQSADGLRCAVSDVEMQEHYDEFFEEVFTEMEEKYGEVEEMNVCDNLGDHLVGNVYVKFRREEDAEKAVIDLNNRWFNGQPLHAELSPVTDFREACCRQYEMGECTRGGFCNFMHLKPISRELRRELYGRRRKKHRSRSRSRERRSRSRDRGRGGGGGGGGGGGGRERDRRRSRDRERSGRFMSLYDDLGVETSDSKTEGWSKNFKLLQSQLQVKKAALTQAKSQRTKQSTVLAPVIDLKRGGSSDDRQIVDTPPHVAAGLKDPVPSGFSAGEVLIPLADEYDPMFPNDYEKVVKRQREERQRQRELERQKEIEEREKRRKDRHEASGFARRPDPDSDEDEDYERERRKRSMGGAAIAPPTSLVEKDKELPRDFPYEEDSRPRSQSSKAAIPPPVYEEQDRPRSPTGPSNSFLANMGGTVAHKIMQKYGFREGQGLGKHEQGLSTALSVEKTSKRGGKIIVGDATEKDASKKSDSNPLTEILKCPTKVVLLRNMVGAGEVDEDLEVETKEECEKYGKVGKCVIFEIPGAPDDEAVRIFLEFERVESAIKAVVDLNGRYFGGRVVKACFYNLDKFRVLDLAEQVKRTADGSEFESPKKKRKV

SEQ ID NO: 513 - protein, 2002 aa, synthetic construct
MKRTADGSEFESPKKKRKVTTTMKISIEFLEPFRMTKWQESTRRNKNNKEFVRGQAFARWHRNKKDNTKGRPYITGTLLRSAVIRSAENLLTLSDGKISEKTCCPGKFDTEDKDRLLQLRQRSTLRWTDKNPCPDNAETYCPFCELLGRSGNDGKKAEKKDWRFRIHFGNLSLPGKPDFDGPKAIGSQRVLNRVDFKSGKAHDFFKAYEVDHTRFPRFEGEITIDNKVSAEARKLLCDSLKFTDRLCGALCVIRFDEYTPAADSGKQTENVQAEPNANLAEKTAEQIISILDDNKKTEYTRLLADAIRSLRRSSKLVAGLPKDHDGKDDHYLWDIGKKKKDENSVTIRQILTTSADTKELKNAGKWREFCEKLGEALYLKSKDMSGGLKITRRILGDAEFHGKPDRLEKSRSVSIGSVLKETVVCGELVAKTPFFFGAIDEDAKQTDLQVLLTPDNKYRLPRSAVRGILRRDLQTYFDSPCNAELGGRPCMCKTCRIMRGITVMDARSEYNAPPEIRHRTRINPFTGTVAEGALFNMEVAPEGIVFPFQLRYRGSEDGLPDALKTVLKWWAEGQAFMSGAASTGKGRFRMENAKYETLDLSDENQRNDYLKNWGWRDEKGLEELKKRLNSGLPEPGNYRDPKWHEINVSIEMASPFINGDPIRAAVDKRGTDVVTFVKYKAEGEEAKPVCAYKAESFRGVIRSAVARIHMEDGVPLTELTHSDCECLLCQIFGSEYEAGKIRFEDLVFESDPEPVTFDHVAIDRFTGGAADKKKFDDSPLPGSPARPLMLKGSFWIRRDVLEDEEYCKALGKALADVNNGLYPLGGKSAIGYGQVKSLGIKGDDKRISRLMNPAFDETDVAVPEKPKTDAEVRIEAEKVYYPHYFVEPHKKVEREEKPCGHQKFHEGRLTGKIRCKLITKTPLIVPDTSNDDFFRPADKEARKEKDEYHKSYAFFRLHKQIMIPGSELRGMVSSVYETVTNSCFRIFDETKRLSWRMDADHQNVLQDFLPGRVTADGKHIQKFSETARVPFYDKTQKHFDILDEQEIAGEKPVRMWVKRFIKRLSLVDPAKHPQKKQDNKWKRRKEGIATFIEQKNGSYYFNVVTNNGCTSFHLWHKPDNFDQEKLEGIQNGEKLDCWVRDSRYQKAFQEIPENDPDGWECKEGYLHVVGPSKVEFSDKKGDVINNFQGTLPSVPNDWKTIRTNDFKNRKRKNEPVFCCEDDKGNYYTMAKYCETFFFDLKENEEYEIPEKARIKYKELLRVYNNNPQAVPESVFQSRVARENVEKLKSGDLVYFKHNEKYVEDIVPVRISRTVDDRMIGKRMSADLRPCHGDWVEDGDLSALNAYPEKRLLLRHPKGLCPACRLFGTGSYKGRVRFGFASLENDPEWLIPGKNPGDPFHGGPVMLSLLERPRPTWSIPGSDNKFKVPGRKFYVHHHAWKTIKDGNHPTTGKAIEQSPNNRTVEALAGGNSFSFEIAFENLKEWELGLLIHSLQLEKGLAHKLGMAKSMGFGSVEIDVESVRLRKDWKQWRNGNSEIPNWLGKGFAKLKEWFRDELDFIENLKKLLWFPEGDQAPRVCYPMLRKKDDPNGNSGYEELKDGEFKKEDRQKKLTTPWTPWAMAEYLASIFGTEKDKVNCSFYFKIGACRHGDRCSRLHNKPTFSQTIALLNIYRNPQNSSQSADGLRCAVSDVEMQEHYDEFFEEVFTEMEEKYGEVEEMNVCDNLGDHLVGNVYVKFRREEDAEKAVIDLNNRWFNGQPLHAELSPVTDFREACCRQYEMGECTRGGFCNFMHLKPISRELRRELYGRRRKKHRSRSRSRERRSRSRDRGRGGGGGGGGGGGGRERDRRRSRDRERSGRFMAMQAAKRANIRLPPEVNRILYIRNLPYKITAEEMYDIFGKYGPIRQIRVGNTPETRGTAYVVYEDIFDAKNACDHLSGFNVCNRYLVVLYYNANRAFQKMDTKKKEEQLKLLKEKYGINTDPPKKRTADGSEFESPKKKRKV

SEQ ID NO: 514 - protein, 2352 aa, synthetic construct
MKRTADGSEFESPKKKRKVTTTMKISIEFLEPFRMTKWQESTRRNKNNKEFVRGQAFARWHRNKKDNTKGRPYITGTLLRSAVIRSAENLLTLSDGKISEKTCCPGKFDTEDKDRLLQLRQRSTLRWTDKNPCPDNAETYCPFCELLGRSGNDGKKAEKKDWRFRIHFGNLSLPGKPDFDGPKAIGSQRVLNRVDFKSGKAHDFFKAYEVDHTRFPRFEGEITIDNKVSAEARKLLCDSLKFTDRLCGALCVIRFDEYTPAADSGKQTENVQAEPNANLAEKTAEQIISILDDNKKTEYTRLLADAIRSLRRSSKLVAGLPKDHDGKDDHYLWDIGKKKKDENSVTIRQILTTSADTKELKNAGKWREFCEKLGEALYLKSKDMSGGLKITRRILGDAEFHGKPDRLEKSRSVSIGSVLKETVVCGELVAKTPFFFGAIDEDAKQTDLQVLLTPDNKYRLPRSAVRGILRRDLQTYFDSPCNAELGGRPCMCKTCRIMRGITVMDARSEYNAPPEIRHRTRINPFTGTVAEGALFNMEVAPEGIVFPFQLRYRGSEDGLPDALKTVLKWWAEGQAFMSGAASTGKGRFRMENAKYETLDLSDENQRNDYLKNWGWRDEKGLEELKKRLNSGLPEPGNYRDPKWHEINVSIEMASPFINGDPIRAAVDKRGTDVVTFVKYKAEGEEAKPVCAYKAESFRGVIRSAVARIHMEDGVPLTELTHSDCECLLCQIFGSEYEAGKIRFEDLVFESDPEPVTFDHVAIDRFTGGAADKKKFDDSPLPGSPARPLMLKGSFWIRRDVLEDEEYCKALGKALADVNNGLYPLGGKSAIGYGQVKSLGIKGDDKRISRLMNPAFDETDVAVPEKPKTDAEVRIEAEKVYYPHYFVEPHKKVEREEKPCGHQKFHEGRLTGKIRCKLITKTPLIVPDTSNDDFFRPADKEARKEKDEYHKSYAFFRLHKQIMIPGSELRGMVSSVYETVTNSCFRIFDETKRLSWRMDADHQNVLQDFLPGRVTADGKHIQKFSETARVPFYDKTQKHFDILDEQEIAGEKPVRMWVKRFIKRLSLVDPAKHPQKKQDNKWKRRKEGIATFIEQKNGSYYFNVVTNNGCTSFHLWHKPDNFDQEKLEGIQNGEKLDCWVRDSRYQKAFQEIPENDPDGWECKEGYLHVVGPSKVEFSDKKGDVINNFQGTLPSVPNDWKTIRTNDFKNRKRKNEPVFCCEDDKGNYYTMAKYCETFFFDLKENEEYEIPEKARIKYKELLRVYNNNPQAVPESVFQSRVARENVEKLKSGDLVYFKHNEKYVEDIVPVRISRTVDDRMIGKRMSADLRPCHGDWVEDGDLSALNAYPEKRLLLRHPKGLCPACRLFGTGSYKGRVRFGFASLENDPEWLIPGKNPGDPFHGGPVMLSLLERPRPTWSIPGSDNKFKVPGRKFYVHHHAWKTIKDGNHPTTGKAIEQSPNNRTVEALAGGNSFSFEIAFENLKEWELGLLIHSLQLEKGLAHKLGMAKSMGFGSVEIDVESVRLRKDWKQWRNGNSEIPNWLGKGFAKLKEWFRDELDFIENLKKLLWFPEGDQAPRVCYPMLRKKDDPNGNSGYEELKDGEFKKEDRQKKLTTPWTPWAMAEYLASIFGTEKDKVNCSFYFKIGACRHGDRCSRLHNKPTFSQTIALLNIYRNPQNSSQSADGLRCAVSDVEMQEHYDEFFEEVFTEMEEKYGEVEEMNVCDNLGDHLVGNVYVKFRREEDAEKAVIDLNNRWFNGQPLHAELSPVTDFREACCRQYEMGECTRGGFCNFMHLKPISRELRRELYGRRRKKHRSRSRSRERRSRSRDRGRGGGGGGGGGGGGRERDRRRSRDRERSGRFMSDFDEFERQLNENKQERDKENRHRKRSHSRSRSRDRKRRSRSRDRRNRDQRSASRDRRRRSKPLTRGAKEEHGGLIRSPRHEKKKKVRKYWDVPPPGFEHITPMQYKAMQAAGQIPATALLPTMTPDGLAVTPTPVPVVGSQMTRQARRLYVGNIPFGITEEAMMDFFNAQMRLGGLTQAPGNPVLAVQINQDKNFAFLEFRSVDETTQAMAFDGIIFQGQSLKIRRPHDYQPLPGMSENPSVYVPGVVSTVVPDSAHKLFIGGLPNYLNDDQVKELLTSFGPLKAFNLVKDSATGLSKGYAFCEYVDINVTDQAIAGLNGMQLGDKKLLVQRASVGAKNATLVSPPSTINQTPVTLQVPGLMSSQVQMGGHPTEVLCLMNMVLPEELLDDEEYEEIVEDVRDECSKYGLVKSIEIPRPVDGVEVPGCGKIFVEFTSVFDCQKAMQGLTGRKFANRVVVTKYCDPDSYHRRDFWKRTADGSEFESPKKKRKV

SEQ ID NO: 515 - protein, 1887 aa, synthetic construct
MKRTADGSEFESPKKKRKVMAMQAAKRANIRLPPEVNRILYIRNLPYKITAEEMYDIFGKYGPIRQIRVGNTPETRGTAYVVYEDIFDAKNACDHLSGFNVCNRYLVVLYYNANRAFQKMDTKKKEEQLKLLKEKYGINTDPPKTTTMKISIEFLEPFRMTKWQESTRRNKNNKEFVRGQAFARWHRNKKDNTKGRPYITGTLLRSAVIRSAENLLTLSDGKISEKTCCPGKFDTEDKDRLLQLRQRSTLRWTDKNPCPDNAETYCPFCELLGRSGNDGKKAEKKDWRFRIHFGNLSLPGKPDFDGPKAIGSQRVLNRVDFKSGKAHDFFKAYEVDHTRFPRFEGEITIDNKVSAEARKLLCDSLKFTDRLCGALCVIRFDEYTPAADSGKQTENVQAEPNANLAEKTAEQIISILDDNKKTEYTRLLADAIRSLRRSSKLVAGLPKDHDGKDDHYLWDIGKKKKDENSVTIRQILTTSADTKELKNAGKWREFCEKLGEALYLKSKDMSGGLKITRRILGDAEFHGKPDRLEKSRSVSIGSVLKETVVCGELVAKTPFFFGAIDEDAKQTDLQVLLTPDNKYRLPRSAVRGILRRDLQTYFDSPCNAELGGRPCMCKTCRIMRGITVMDARSEYNAPPEIRHRTRINPFTGTVAEGALFNMEVAPEGIVFPFQLRYRGSEDGLPDALKTVLKWWAEGQAFMSGAASTGKGRFRMENAKYETLDLSDENQRNDYLKNWGWRDEKGLEELKKRLNSGLPEPGNYRDPKWHEINVSIEMASPFINGDPIRAAVDKRGTDVVTFVKYKAEGEEAKPVCAYKAESFRGVIRSAVARIHMEDGVPLTELTHSDCECLLCQIFGSEYEAGKIRFEDLVFESDPEPVTFDHVAIDRFTGGAADKKKFDDSPLPGSPARPLMLKGSFWIRRDVLEDEEYCKALGKALADVNNGLYPLGGKSAIGYGQVKSLGIKGDDKRISRLMNPAFDETDVAVPEKPKTDAEVRIEAEKVYYPHYFVEPHKKVEREEKPCGHQKFHEGRLTGKIRCKLITKTPLIVPDTSNDDFFRPADKEARKEKDEYHKSYAFFRLHKQIMIPGSELRGMVSSVYETVTNSCFRIFDETKRLSWRMDADHQNVLQDFLPGRVTADGKHIQKFSETARVPFYDKTQKHFDILDEQEIAGEKPVRMWVKRFIKRLSLVDPAKHPQKKQDNKWKRRKEGIATFIEQKNGSYYFNVVTNNGCTSFHLWHKPDNFDQEKLEGIQNGEKLDCWVRDSRYQKAFQEIPENDPDGWECKEGYLHVVGPSKVEFSDKKGDVINNFQGTLPSVPNDWKTIRTNDFKNRKRKNEPVFCCEDDKGNYYTMAKYCETFFFDLKENEEYEIPEKARIKYKELLRVYNNNPQAVPESVFQSRVARENVEKLKSGDLVYFKHNEKYVEDIVPVRISRTVDDRMIGKRMSADLRPCHGDWVEDGDLSALNAYPEKRLLLRHPKGLCPACRLFGTGSYKGRVRFGFASLENDPEWLIPGKNPGDPFHGGPVMLSLLERPRPTWSIPGSDNKFKVPGRKFYVHHHAWKTIKDGNHPTTGKAIEQSPNNRTVEALAGGNSFSFEIAFENLKEWELGLLIHSLQLEKGLAHKLGMAKSMGFGSVEIDVESVRLRKDWKQWRNGNSEIPNWLGKGFAKLKEWFRDELDFIENLKKLLWFPEGDQAPRVCYPMLRKKDDPNGNSGYEELKDGEFKKEDRQKKLTTPWTPWAMAMQAAKRANIRLPPEVNRILYIRNLPYKITAEEMYDIFGKYGPIRQIRVGNTPETRGTAYVVYEDIFDAKNACDHLSGFNVCNRYLVVLYYNANRAFQKMDTKKKEEQLKLLKEKYGINTDPPKKRTADGSEFESPKKKRKV

SEQ ID NO: 516 - protein, 2117 aa, synthetic construct
MKRTADGSEFESPKKKRKVMAEYLASIFGTEKDKVNCSFYFKIGACRHGDRCSRLHNKPTFSQTIALLNIYRNPQNSSQSADGLRCAVSDVEMQEHYDEFFEEVFTEMEEKYGEVEEMNVCDNLGDHLVGNVYVKFRREEDAEKAVIDLNNRWFNGQPIHAELSPVTDFREACCRQYEMGECTRGGFCNFMHLKPISRELRRELYGRRRKKHRSRSRSRERRSRSRDRGRGGGGGGGGGGGGRERDRRRSRDRERSGRFTTTMKISIEFLEPFRMTKWQESTRRNKNNKEFVRGQAFARWHRNKKDNTKGRPYITGTLLRSAVIRSAENLLTLSDGKISEKTCCPGKFDTEDKDRLLQLRQRSTLRWTDKNPCPDNAETYCPFCELLGRSGNDGKKAEKKDWRFRIHFGNLSLPGKPDFDGPKAIGSQRVLNRVDFKSGKAHDFFKAYEVDHTRFPRFEGEITIDNKVSAEARKLLCDSLKFTDRLCGALCVIRFDEYTPAADSGKQTENVQAEPNANLAEKTAEQIISILDDNKKTEYTRLLADAIRSLRRSSKLVAGLPKDHDGKDDHYLWDIGKKKKDENSVTIRQILTTSADTKELKNAGKWREFCEKLGEALYLKSKDMSGGLKITRRILGDAEFHGKPDRLEKSRSVSIGSVLKETVVCGELVAKTPFFFGAIDEDAKQTDLQVLLTPDNKYRLPRSAVRGILRRDLQTYFDSPCNAELGGRPCMCKTCRIMRGITVMDARSEYNAPPEIRHRTRINPFTGTVAEGALFNMEVAPEGIVFPFQLRYRGSEDGLPDALKTVLKWWAEGQAFMSGAASTGKGRFRMENAKYETLDLSDENQRNDYLKNWGWRDEKGLEELKKRLNSGLPEPGNYRDPKWHEINVSIEMASPFINGDPIRAAVDKRGTDVVTFVKYKAEGEEAKPVCAYKAESFRGVIRSAVARIHMEDGVPLTELTHSDCECLLCQIFGSEYEAGKIRFEDLVFESDPEPVTFDHVAIDRFTGGAADKKKFDDSPLPGSPARPLMLKGSFWIRRDVLEDEEYCKALGKALADVNNGLYPLGGKSAIGYGQVKSLGIKGDDKRISRLMNPAFDETDVAVPEKPKTDAEVRIEAEKVYYPHYFVEPHKKVEREEKPCGHQKFHEGRLTGKIRCKLITKTPLIVPDTSNDDFFRPADKEARKEKDEYHKSYAFFRLHKQIMIPGSELRGMVSSVYETVTNSCFRIFDETKRLSWRMDADHQNVLQDFLPGRVTADGKHIQKFSETARVPFYDKTQKHFDILDEQEIAGEKPVRMWVKRFIKRLSLVDPAKHPQKKQDNKWKRRKEGIATFIEQKNGSYYFNVVTNNGCTSFHLWHKPDNFDQEKLEGIQNGEKLDCWVRDSRYQKAFQEIPENDPDGWECKEGYLHVVGPSKVEFSDKKGDVINNFQGTLPSVPNDWKTIRTNDFKNRKRKNEPVFCCEDDKGNYYTMAKYCETFFFDLKENEEYEIPEKARIKYKELLRVYNNNPQAVPESVFQSRVARENVEKLKSGDLVYFKHNEKYVEDIVPVRISRTVDDRMIGKRMSADLRPCHGDWVEDGDLSALNAYPEKRLLLRHPKGLCPACRLFGTGSYKGRVRFGFASLENDPEWLIPGKNPGDPFHGGPVMLSLLERPRPTWSIPGSDNKFKVPGRKFYVHHHAWKTIKDGNHPTTGKAIEQSPNNRTVEALAGGNSFSFEIAFENLKEWELGLLIHSLQLEKGLAHKLGMAKSMGFGSVEIDVESVRLRKDWKQWRNGNSEIPNWLGKGFAKLKEWFRDELDFIENLKKLLWFPEGDQAPRVCYPMLRKKDDPNGNSGYEELKDGEFKKEDRQKKLTTPWTPWAMAEYLASIFGTEKDKVNCSFYFKIGACRHGDRCSRLHNKPTFSQTIALLNIYRNPQNSSQSADGLRCAVSDVEMQEHYDEFFEEVFTEMEEKYGEVEEMNVCDNLGDHLVGNVYVKFRREEDAEKAVIDLNNRWFNGQPIHAELSPVTDFREACCRQYEMGECTRGGFCNFMHLKPISRELRRELYGRRRKKHRSRSRSRERRSRSRDRGRGGGGGGGGGGGGRERDRRRSRDRERSGRFKRTADGSEFESPKKKRKV

SEQ ID NO: 517 - protein, 2278 aa, synthetic construct
MKRTADGSEFESPKKKRKVMSLYDDLGVETSDSKTEGWSKNFKLLQSQLQVKKAALTQAKSQRTKQSTVLAPVIDLKRGGSSDDRQIVDTPPHVAAGLKDPVPSGFSAGEVLIPLADEYDPMFPNDYEKVVKRQREERQRQRELERQKEIEEREKRRKDRHEASGFARRPDPDSDEDEDYERERRKRSMGGAAIAPPTSLVEKDKELPRDFPYEEDSRPRSQSSKAAIPPPVYEEQDRPRSPTGPSNSFLANMGGTVAHKIMQKYGFREGQGLGKHEQGLSTALSVEKTSKRGGKIIVGDATEKDASKKSDSNPLTEILKCPTKVVLLRNMVGAGEVDEDLEVETKEECEKYGKVGKCVIFEIPGAPDDEAVRIFLEFERVESAIKAVVDLNGRYFGGRVVKACFYNLDKFRVLDLAEQVTTTMKISIEFLEPFRMTKWQESTRRNKNNKEFVRGQAFARWHRNKKDNTKGRPYITGTLLRSAVIRSAENLLTLSDGKISEKTCCPGKFDTEDKDRLLQLRQRSTLRWTDKNPCPDNAETYCPFCELLGRSGNDGKKAEKKDWRFRIHFGNLSLPGKPDFDGPKAIGSQRVLNRVDFKSGKAHDFFKAYEVDHTRFPRFEGEITIDNKVSAEARKLLCDSLKFTDRLCGALCVIRFDEYTPAADSGKQTENVQAEPNANLAEKTAEQIISILDDNKKTEYTRLLADAIRSLRRSSKLVAGLPKDHDGKDDHYLWDIGKKKKDENSVTIRQILTTSADTKELKNAGKWREFCEKLGEALYLKSKDMSGGLKITRRILGDAEFHGKPDRLEKSRSVSIGSVLKETVVCGELVAKTPFFFGAIDEDAKQTDLQVLLTPDNKYRLPRSAVRGILRRDLQTYFDSPCNAELGGRPCMCKTCRIMRGITVMDARSEYNAPPEIRHRTRINPFTGTVAEGALFNMEVAPEGIVFPFQLRYRGSEDGLPDALKTVLKWWAEGQAFMSGAASTGKGRFRMENAKYETLDLSDENQRNDYLKNWGWRDEKGLEELKKRLNSGLPEPGNYRDPKWHEINVSIEMASPFINGDPIRAAVDKRGTDVVTFVKYKAEGEEAKPVCAYKAESFRGVIRSAVARIHMEDGVPLTELTHSDCECLLCQIFGSEYEAGKIRFEDLVFESDPEPVTFDHVAIDRFTGGAADKKKFDDSPLPGSPARPLMLKGSFWIRRDVLEDEEYCKALGKALADVNNGLYPLGGKSAIGYGQVKSLGIKGDDKRISRLMNPAFDETDVAVPEKPKTDAEVRIEAEKVYYPHYFVEPHKKVEREEKPCGHQKFHEGRLTGKIRCKLITKTPLIVPDTSNDDFFRPADKEARKEKDEYHKSYAFFRLHKQIMIPGSELRGMVSSVYETVTNSCFRIFDETKRLSWRMDADHQNVLQDFLPGRVTADGKHIQKFSETARVPFYDKTQKHFDILDEQEIAGEKPVRMWVKRFIKRLSLVDPAKHPQKKQDNKWKRRKEGIATFIEQKNGSYYFNVVTNNGCTSFHLWHKPDNFDQEKLEGIQNGEKLDCWVRDSRYQKAFQEIPENDPDGWECKEGYLHVVGPSKVEFSDKKGDVINNFQGTLPSVPNDWKTIRTNDFKNRKRKNEPVFCCEDDKGNYYTMAKYCETFFFDLKENEEYEIPEKARIKYKELLRVYNNNPQAVPESVFQSRVARENVEKLKSGDLVYFKHNEKYVEDIVPVRISRTVDDRMIGKRMSADLRPCHGDWVEDGDLSALNAYPEKRLLLRHPKGLCPACRLFGTGSYKGRVRFGFASLENDPEWLIPGKNPGDPFHGGPVMLSLLERPRPTWSIPGSDNKFKVPGRKFYVHHHAWKTIKDGNHPTTGKAIEQSPNNRTVEALAGGNSFSFEIAFENLKEWELGLLIHSLQLEKGLAHKLGMAKSMGFGSVEIDVESVRLRKDWKQWRNGNSEIPNWLGKGFAKLKEWFRDELDFIENLKKLLWFPEGDQAPRVCYPMLRKKDDPNGNSGYEELKDGEFKKEDRQKKLTTPWTPWAMAEYLASIFGTEKDKVNCSFYFKIGACRHGDRCSRLHNKPTFSQTIALLNIYRNPQNSSQSADGLRCAVSDVEMQEHYDEFFEEVFTEMEEKYGEVEEMNVCDNLGDHLVGNVYVKFRREEDAEKAVIDLNNRWFNGQPLHAELSPVTDFREACCRQYEMGECTRGGFCNFMHLKPISRELRRELYGRRRKKHRSRSRSRERRSRSRDRGRGGGGGGGGGGGGRERDRRRSRDRERSGRFKRTADGSEFESPKKKRKV

SEQ ID NO: 518 - protein, 2002 aa, synthetic construct
MKRTADGSEFESPKKKRKVMAMQAAKRANIRLPPEVNRILYIRNLPYKITAEEMYDIFGKYGPIRQIRVGNTPETRGTAYVVYEDIFDAKNACDHLSGFNVCNRYLVVLYYNANRAFQKMDTKKKEEQLKLLKEKYGINTDPPKTTTMKISIEFLEPFRMTKWQESTRRNKNNKEFVRGQAFARWHRNKKDNTKGRPYITGTLLRSAVIRSAENLLTLSDGKISEKTCCPGKFDTEDKDRLLQLRQRSTLRWTDKNPCPDNAETYCPFCELLGRSGNDGKKAEKKDWRFRIHFGNLSLPGKPDFDGPKAIGSQRVLNRVDFKSGKAHDFFKAYEVDHTRFPRFEGEITIDNKVSAEARKLLCDSLKFTDRLCGALCVIRFDEYTPAADSGKQTENVQAEPNANLAEKTAEQIISILDDNKKTEYTRLLADAIRSLRRSSKLVAGLPKDHDGKDDHYLWDIGKKKKDENSVTIRQILTTSADTKELKNAGKWREFCEKLGEALYLKSKDMSGGLKITRRILGDAEFHGKPDRLEKSRSVSIGSVLKETVVCGELVAKTPFFFGAIDEDAKQTDLQVLLTPDNKYRLPRSAVRGILRRDLQTYFDSPCNAELGGRPCMCKTCRIMRGITVMDARSEYNAPPEIRHRTRINPFTGTVAEGALFNMEVAPEGIVFPFQLRYRGSEDGLPDALKTVLKWWAEGQAFMSGAASTGKGRFRMENAKYETLDLSDENQRNDYLKNWGWRDEKGLEELKKRLNSGLPEPGNYRDPKWHEINVSIEMASPFINGDPIRAAVDKRGTDVVTFVKYKAEGEEAKPVCAYKAESFRGVIRSAVARIHMEDGVPLTELTHSDCECLLCQIFGSEYEAGKIRFEDLVFESDPEPVTFDHVAIDRFTGGAADKKKFDDSPLPGSPARPLMLKGSFWIRRDVLEDEEYCKALGKALADVNNGLYPLGGKSAIGYGQVKSLGIKGDDKRISRLMNPAFDETDVAVPEKPKTDAEVRIEAEKVYYPHYFVEPHKKVEREEKPCGHQKFHEGRLTGKIRCKLITKTPLIVPDTSNDDFFRPADKEARKEKDEYHKSYAFFRLHKQIMIPGSELRGMVSSVYETVTNSCFRIFDETKRLSWRMDADHQNVLQDFLPGRVTADGKHIQKFSETARVPFYDKTQKHFDILDEQEIAGEKPVRMWVKRFIKRLSLVDPAKHPQKKQDNKWKRRKEGIATFIEQKNGSYYFNVVTNNGCTSFHLWHKPDNFDQEKLEGIQNGEKLDCWVRDSRYQKAFQEIPENDPDGWECKEGYLHVVGPSKVEFSDKKGDVINNFQGTLPSVPNDWKTIRTNDFKNRKRKNEPVFCCEDDKGNYYTMAKYCETFFFDLKENEEYEIPEKARIKYKELLRVYNNNPQAVPESVFQSRVARENVEKLKSGDLVYFKHNEKYVEDIVPVRISRTVDDRMIGKRMSADLRPCHGDWVEDGDLSALNAYPEKRLLLRHPKGLCPACRLFGTGSYKGRVRFGFASLENDPEWLIPGKNPGDPFHGGPVMLSLLERPRPTWSIPGSDNKFKVPGRKFYVHHHAWKTIKDGNHPTTGKAIEQSPNNRTVEALAGGNSFSFEIAFENLKEWELGLLIHSLQLEKGLAHKLGMAKSMGFGSVEIDVESVRLRKDWKQWRNGNSEIPNWLGKGFAKLKEWFRDELDFIENLKKLLWFPEGDQAPRVCYPMLRKKDDPNGNSGYEELKDGEFKKEDRQKKLTTPWTPWAMAEYLASIFGTEKDKVNCSFYFKIGACRHGDRCSRLHNKPTFSQTIALLNIYRNPQNSSQSADGLRCAVSDVEMQEHYDEFFEEVFTEMEEKYGEVEEMNVCDNLGDHLVGNVYVKFRREEDAEKAVIDLNNRWFNGQPLHAELSPVTDFREACCRQYEMGECTRGGFCNFMHLKPISRELRRELYGRRRKKHRSRSRSRERRSRSRDRGRGGGGGGGGGGGGRERDRRRSRDRERSGRFKRTADGSEFESPKKKRKV

SEQ ID NO: 519 - protein, 2002 aa, synthetic construct
MKRTADGSEFESPKKKRKVMAEYLASIFGTEKDKVNCSFYFKIGACRHGDRCSRLHNKPTFSQTIALLNIYRNPQNSSQSADGLRCAVSDVEMQEHYDEFFEEVFTEMEEKYGEVEEMNVCDNLGDHLVGNVYVKFRREEDAEKAVIDLNNRWFNGQPLHAELSPVTDFREACCRQYEMGECTRGGFCNFMHLKPISRELRRELYGRRRKKHRSRSRSRERRSRSRDRGRGGGGGGGGGGGGRERDRRRSRDRERSGRFTTTMKISIEFLEPFRMTKWQESTRRNKNNKEFVRGQAFARWHRNKKDNTKGRPYITGTLLRSAVIRSAENLLTLSDGKISEKTCCPGKFDTEDKDRLLQLRQRSTLRWTDKNPCPDNAETYCPFCELLGRSGNDGKKAEKKDWRFRIHFGNLSLPGKPDFDGPKAIGSQRVLNRVDFKSGKAHDFFKAYEVDHTRFPRFEGEITIDNKVSAEARKLLCDSLKFTDRLCGALCVIRFDEYTPAADSGKQTENVQAEPNANLAEKTAEQIISILDDNKKTEYTRLLADAIRSLRRSSKLVAGLPKDHDGKDDHYLWDIGKKKKDENSVTIRQILTTSADTKELKNAGKWREFCEKLGEALYLKSKDMSGGLKITRRILGDAEFHGKPDRLEKSRSVSIGSVLKETVVCGELVAKTPFFFGAIDEDAKQTDLQVLLTPDNKYRLPRSAVRGILRRDLQTYFDSPCNAELGGRPCMCKTCRIMRGITVMDARSEYNAPPEIRHRTRINPFTGTVAEGALFNMEVAPEGIVFPFQLRYRGSEDGLPDALKTVLKWWAEGQAFMSGAASTGKGRFRMENAKYETLDLSDENQRNDYLKNWGWRDEKGLEELKKRLNSGLPEPGNYRDPKWHEINVSIEMASPFINGDPIRAAVDKRGTDVVTFVKYKAEGEEAKPVCAYKAESFRGVIRSAVARIHMEDGVPLTELTHSDCECLLCQIFGSEYEAGKIRFEDLVFESDPEPVTFDHVAIDRFTGGAADKKKFDDSPLPGSPARPLMLKGSFWIRRDVLEDEEYCKALGKALADVNNGLYPLGGKSAIGYGQVKSLGIKGDDKRISRLMNPAFDETDVAVPEKPKTDAEVRIEAEKVYYPHYFVEPHKKVEREEKPCGHQKFHEGRLTGKIRCKLITKTPLIVPDTSNDDFFRPADKEARKEKDEYHKSYAFFRLHKQIMIPGSELRGMVSSVYETVTNSCFRIFDETKRLSWRMDADHQNVLQDFLPGRVTADGKHIQKFSETARVPFYDKTQKHFDILDEQEIAGEKPVRMWVKRFIKRLSLVDPAKHPQKKQDNKWKRRKEGIATFIEQKNGSYYFNVVTNNGCTSFHLWHKPDNFDQEKLEGIQNGEKLDCWVRDSRYQKAFQEIPENDPDGWECKEGYLHVVGPSKVEFSDKKGDVINNFQGTLPSVPNDWKTIRTNDFKNRKRKNEPVFCCEDDKGNYYTMAKYCETFFFDLKENEEYEIPEKARIKYKELLRVYNNNPQAVPESVFQSRVARENVEKLKSGDLVYFKHNEKYVEDIVPVRISRTVDDRMIGKRMSADLRPCHGDWVEDGDLSALNAYPEKRLLLRHPKGLCPACRLFGTGSYKGRVRFGFASLENDPEWLIPGKNPGDPFHGGPVMLSLLERPRPTWSIPGSDNKFKVPGRKFYVHHHAWKTIKDGNHPTTGKAIEQSPNNRTVEALAGGNSFSFEIAFENLKEWELGLLIHSLQLEKGLAHKLGMAKSMGFGSVEIDVESVRLRKDWKQWRNGNSEIPNWLGKGFAKLKEWFRDELDFIENLKKLLWFPEGDQAPRVCYPMLRKKDDPNGNSGYEELKDGEFKKEDRQKKLTTPWTPWAMAMQAAKRANIRLPPEVNRILYIRNLPYKITAEEMYDIFGKYGPIRQIRVGNTPETRGTAYVVYEDIFDAKNACDHLSGFNVCNRYLVVLYYNANRAFQKMDTKKKEEQLKLLKEKYGINTDPPKKRTADGSEFESPKKKRKV

SEQ ID NO: 520 - protein, 2352 aa, synthetic construct
MKRTADGSEFESPKKKRKVMSDFDEFERQLNENKQERDKENRHRKRSHSRSRSRDRKRRSRSRDRRNRDQRSASRDRRRRSKPLTRGAKEEHGGLIRSPRHEKKKKVRKYWDVPPPGFEHITPMQYKAMQAAGQIPATALLPTMTPDGLAVTPTPVPVVGSQMTRQARRLYVGNIPFGITEEAMMDFFNAQMRLGGLTQAPGNPVLAVQINQDKNFAFLEFRSVDETTQAMAFDGIIFQGQSLKIRRPHDYQPLPGMSENPSVYVPGVVSTVVPDSAHKLFIGGLPNYLNDDQVKELLTSFGPLKAFNLVKDSATGLSKGYAFCEYVDINVTDQAIAGLNGMQLGDKKLLVQRASVGAKNATLVSPPSTINQTPVTLQVPGLMSSQVQMGGHPTEVLCLMNMVLPEELLDDEEYEEIVEDVRDECSKYGLVKSIEIPRPVDGVEVPGCGKIFVEFTSVFDCQKAMQGLTGRKFANRVVVTKYCDPDSYHRRDFWTTTMKISIEFLEPFRMTKWQESTRRNKNNKEFVRGQAFARWHRNKKDNTKGRPYITGTLLRSAVIRSAENLLTLSDGKISEKTCCPGKFDTEDKDRLLQLRQRSTLRWTDKNPCPDNAETYCPFCELLGRSGNDGKKAEKKDWRFRIHFGNLSLPGKPDFDGPKAIGSQRVLNRVDFKSGKAHDFFKAYEVDHTRFPRFEGEITIDNKVSAEARKLLCDSLKFTDRLCGALCVIRFDEYTPAADSGKQTENVQAEPNANLAEKTAEQIISILDDNKKTEYTRLLADAIRSLRRSSKLVAGLPKDHDGKDDHYLWDIGKKKKDENSVTIRQILTTSADTKELKNAGKWREFCEKLGEALYLKSKDMSGGLKITRRILGDAEFHGKPDRLEKSRSVSIGSVLKETVVCGELVAKTPFFFGAIDEDAKQTDLQVLLTPDNKYRLPRSAVRGILRRDLQTYFDSPCNAELGGRPCMCKTCRIMRGITVMDARSEYNAPPEIRHRTRINPFTGTVAEGALFNMEVAPEGIVFPFQLRYRGSEDGLPDALKTVLKWWAEGQAFMSGAASTGKGRFRMENAKYETLDLSDENQRNDYLKNWGWRDEKGLEELKKRLNSGLPEPGNYRDPKWHEINVSIEMASPFINGDPIRAAVDKRGTDVVTFVKYKAEGEEAKPVCAYKAESFRGVIRSAVARIHMEDGVPLTELTHSDCECLLCQIFGSEYEAGKIRFEDLVFESDPEPVTFDHVAIDRFTGGAADKKKFDDSPLPGSPARPLMLKGSFWIRRDVLEDEEYCKALGKALADVNNGLYPLGGKSAIGYGQVKSLGIKGDDKRISRLMNPAFDETDVAVPEKPKTDAEVRIEAEKVYYPHYFVEPHKKVEREEKPCGHQKFHEGRLTGKIRCKLITKTPLIVPDTSNDDFFRPADKEARKEKDEYHKSYAFFRLHKQIMIPGSELRGMVSSVYETVTNSCFRIFDETKRLSWRMDADHQNVLQDFLPGRVTADGKHIQKFSETARVPFYDKTQKHFDILDEQEIAGEKPVRMWVKRFIKRLSLVDPAKHPQKKQDNKWKRRKEGIATFIEQKNGSYYFNVVTNNGCTSFHLWHKPDNFDQEKLEGIQNGEKLDCWVRDSRYQKAFQEIPENDPDGWECKEGYLHVVGPSKVEFSDKKGDVINNFQGTLPSVPNDWKTIRTNDFKNRKRKNEPVFCCEDDKGNYYTMAKYCETFFFDLKENEEYEIPEKARIKYKELLRVYNNNPQAVPESVFQSRVARENVEKLKSGDLVYFKHNEKYVEDIVPVRISRTVDDRMIGKRMSADLRPCHGDWVEDGDLSALNAYPEKRLLLRHPKGLCPACRLFGTGSYKGRVRFGFASLENDPEWLIPGKNPGDPFHGGPVMLSLLERPRPTWSIPGSDNKFKVPGRKFYVHHHAWKTIKDGNHPTTGKAIEQSPNNRTVEALAGGNSFSFEIAFENLKEWELGLLIHSLQLEKGLAHKLGMAKSMGFGSVEIDVESVRLRKDWKQWRNGNSEIPNWLGKGFAKLKEWFRDELDFIENLKKLLWFPEGDQAPRVCYPMLRKKDDPNGNSGYEELKDGEFKKEDRQKKLTTPWTPWAMAEYLASIFGTEKDKVNCSFYFKIGACRHGDRCSRLHNKPTFSQTIALLNIYRNPQNSSQSADGLRCAVSDVEMQEHYDEFFEEVFTEMEEKYGEVEEMNVCDNLGDHLVGNVYVKFRREEDAEKAVIDLNNRWFNGQPLHAELSPVTDFREACCRQYEMGECTRGGFCNFMHLKPISRELRRELYGRRRKKHRSRSRSRERRSRSRDRGRGGGGGGGGGGGGRERDRRRSRDRERSGRFKRTADGSEFESPKKKRKV

SEQ ID NO: 521 - protein, 1326 aa, synthetic construct
MKRTADGSEFESPKKKRKVTTTMKISIEFLEPFRMTKWQESTRRNKNNKEFVRGQAFARWHRNKKDNTKGRPYITGTLLRSAVIRSAENLLTLSDGKISEKTCCPGKFDTEDKDRLLQLRQRSTLRWTDKNPCPDNAETYCPFCELLGRSGNDGKKAEKKDWRFRIHFGNLSLPGKPDFDGPKAIGSQRVLNRVDFKSGKAHDFFKAYEVDHTRFPRFEGEITIDNKVSAEARKLLCDSLKFTDRLCGALCVIRFDEYTPAADSGKQTENVQAEPNANLAEKTAEQIISILDDNKKTRYTRLLADAIRSLRRSSKLVAGLPKDHDGKDDHYLWDIGKKKKDENSVTIRQILTTSADTKELKNAGKWREFCEKLGEALYLKSKDMSGGLKITRRILGDAEFHGKPDRLEKSRSVSIGSVLKETVVCGELVAKTPFFFGAIDEDAKQTDLQVLLTPDNKYRLPRSAVRGILRRDLQTYFDSPCNAELGGRPCMCKTCRIMRGITVMDARSEYNAPPEIRHRTRINPFTGTVAEGALFNMEVAPEGIVFPFQLRYRGSEDGLPDALKTVLKWWAEGQAFMSGAASTGKGRFRMENAKYETLDLSDENQRNDYLKNWGWRDEKGLEELKKRLNSGLPEPGNYRDPKWHEINVSIEMASPFINGDPIRAAVDKRGTDVVTFVKYKAEGEEAKPVCAYKAESFRGVIRSAVARIHMEDGVPLTELTHSDCECLLCQIFGSEYEAGKIRFEDLVFESDPEPVTFDHVAIDRFTGGAADKKKFDDSPLPGSPARPLMLKGSFWIRRDVLEDEEYCKALGKALADVNNGLYPLGGKSAIGYGQVKSLGIKGDDKRISRLMNPAFDETDVAVPEKPKTDAEVRIEAEKVYYPHYFVEPHKKVEREEKPCGHQKFHEGRLTGKIRCKLITKTPLIVPDTSNDDFFRPADKEARKEKDEYHKSYAFFRLHKQIMIPGSELRGMVSSVYETVTNSCFRIFDETKRLSWRGGGSRTVDDRMIGKRMSADLRPCHGDWVEDGDLSALNAYPEKRLLLRHPKGLCPACRLFGTGSYKGRVRFGFASLENDPEWLIPGKNPGDPFHGGPVMLSLLERPRPTWSIPGSDNKFKVPGRKFYVHHHAWKTIKDGNHPTTGKAIEQSPNNRTVEALAGGNSFSFEIAFENLKEWELGLLIHSLQLEKGLAHKLGMAKSMGFGSVEIDVESVRLRKDWKQWRNGNSEIPNWLGKGFAKLKEWFRDELDFIENLKKLLWFPEGDQAPRVCYPMLRKKDDPNGNSGYEELKRGEFKKEDRQKKLTTPWTPWAKRTADGSEFESPKKKRKV

SEQ ID NO: 522 - protein, 1727 aa, synthetic construct
MKRTADGSEFESPKKKRKVTTTMKISIEFLEPFRMTKWQESTRRNKNNKEFVRGQAFARWHRNKKDNTKGRPYITGTLLRSAVIRSAENLLTLSDGKISEKTCCPGKFDTEDKDRLLQLRQRSTLRWTDKNPCPDNAETYCPFCELLGRSGNDGKKAEKKDWRFRIHFGNLSLPGKPDFDGPKAIGSQRVLNRVDFKSGKAHDFFKAYEVDHTRFPRFEGEITIDNKVSAEARKLLCDSLKFTDRLCGALCVIRFDEYTPAADSGKQTENVQAEPNANLAEKTAEQIISILDDNKKTEYTRLLADAIRSLRRSSKLVAGLPKDHDGKDDHYLWDIGKKKKDENSVTIRQILTTSADTKELKNAGKWREFCEKLGEALYLKSKDMSGGLKITRRILGDAEFHGKPDRLEKSRSVSIGSVLKETVVCGELVAKTPFFFGAIDEDAKQTDLQVLLTPDNKYRLPRSAVRGILRRDLQTYFDSPCNAELGGRPCMCKTCRIMRGITVMDARSEYNAPPEIRHRTRINPFTGTVAEGALFNMEVAPEGIVFPFQLRYRGSEDGLPDALKTVLKWWAEGQAFMSGAASTGKGRFRMENAKYETLDLSDENQRNDYLKNWGWRDEKGLEELKKRLNSGLPEPGNYRDPKWHEINVSIEMASPFINGDPIRAAVDKRGTDVVTFVKYKAEGEEAKPVCAYKAESFRGVIRSAVARIHMEDGVPLTELTHSDCECLLCQIFGSEYEAGKIRFEDLVFESDPEPVTFDHVAIDRFTGGAADKKKFDDSPLPGSPARPLMLKGSFWIRRDVLEDEEYCKALGKALADVNNGLYPLGGKSAIGYGQVKSLGIKGDDKRISRLMNPAFDETDVAVPEKPKTDAEVRIEAEKVYYPHYFVEPHKKVEREEKPCGHQKFHEGRLTGKIRCKLITKTPLIVPDTSNDDFFRPADKEARKEKDEYHKSYAFFRLHKQIMIPGSELRGMVSSVYETVTNSCFRIFDETKRLSWRGGGSRTVDDRMIGKRMSADLRPCHGDWVEDGDLSALNAYPEKRLLLRHPKGLCPACRLFGTGSYKGRVRFGFASLENDPEWLIPGKNPGDPFHGGPVMLSLLERPRPTWSIPGSDNKFKVPGRKFYVHHHAWKTIKDGNHPTTGKAIEQSPNNRTVEALAGGNSFSFEIAFENLKEWELGLLIHSLQLEKGLAHKLGMAKSMGFGSVEIDVESVRLRKDWKQWRNGNSEIPNWLGKGFAKLKEWFRDELDFIENLKKLLWFPEGDQAPRVCYPMLRKKDDPNGNSGYEELKDGEFKKEDRQKKLTTPWTPWAMSLYDDLGVETSDSKTEGWSKNFKLLQSQLQVKKAALTQAKSQRTKQSTVLAPVIDLKRGGSSDDRQIVDTPPHVAAGLKDPVPSGFSAGEVLIPLADEYDPMFPNDYEKVVKRQREERQRQRELERQKEIEEREKRRKDRHEASGFARRPDPDSDEDEDYERERRKRSMGGAAIAPPTSLVEKDKELPRDFPYEEDSRPRSQSSKAAIPPPVYEEQDRPRSPTGPSNSFLANMGGTVAHKIMQKYGFREGQGLGKHEQGLSTALSVEKTSKRGGKIIVGDATEKDASKKSDSNPLTEILKCPTKVVLLRNMVGAGEVDEDLEVETKEECEKYGKVGKCVIFEIPGAPDDEAVRIFLEFERVESAIKAVVDLNGRYFGGRVVKACFYNLDKFRVLDLAEQVKRTADGSEFESPKKKRKV

SEQ ID NO: 523 - protein, 1451 aa, synthetic construct
MKRTADGSEFESPKKKRKVTTTMKISIEFLEPFRMTKWQESTRRNKNNKEFVRGQAFARWHRNKKDNTKGRPYITGTLLRSAVIRSAENLLTLSDGKISEKTCCPGKFDTEDKDRLLQLRQRSTLRWTDKNPCPDNAETYCPFCELLGRSGNDGKKAEKKDWRFRIHFGNLSLPGKPDFDGPKAIGSQRVLNRVDFKSGKAHDFFKAYEVDHTRFPRFEGEITIDNKVSAEARKLLCDSLKFTDRLCGALCVIRFDEYTPAADSGKQTENVQAEPNANLAEKTAEQIISILDDNKKTEYTRLLADAIRSLRRSSKLVAGLPKDHDGKDDHYLWDIGKKKKDENSVTIRQILTTSADTKELKNAGKWREFCEKLGEALYLKSKDMSGGLKITRRILGDAEFHGKPDRLEKSRSVSIGSVLKETVVCGELVAKTPFFFGAIDEDAKQTDLQVLLTPDNKYRLPRSAVRGILRRDLQTYFDSPCNAELGGRPCMCKTCRIMRGITVMDARSEYNAPPEIRHRTRINPFTGTVAEGALFNMEVAPEGIVFPFQLRYRGSEDGLPDALKTVLKWWAEGQAFMSGAASTGKGRFRMENAKYETLDLSDENQRNDYLKNWGWRDEKGLEELKKRLNSGLPEPGNYRDPKWHEINVSIEMASPFINGDPIRAAVDKRGTDVVTFVKYKAEGEEAKPVCAYKAESFRGVIRSAVARIHMEDGVPLTELTHSDCECLLCQIFGSEYEAGKIRFEDLVFESDPEPVTFDHVAIDRFTGGAADKKKFDDSPLPGSPARPLMLKGSFWIRRDVLEDEEYCKALGKALADVNNGLYPLGGKSAIGYGQVKSLGIKGDDKRISRLMNPAFDETDVAVPEKPKTDAEVRIEAEKVYYPHYFVEPHKKVEREEKPCGHQKFHEGRLTGKIRCKLITKTPLIVPDTSNDDFFRPADKEARKEKDEYHKSYAFFRLHKQIMIPGSELRGMVSSVYETVTNSCFRIFDETKRLSWRGGGSRTVDDRMIGKRMSADLRPCHGDWVEDGDLSALNAYPEKRLLLRHPKGLCPACRLFGTGSYKGRVRFGFASLENDPEWLIPGKNPGDPFHGGPVMLSLLERPRPTWSIPGSDNKFKVPGRKFYVHHHAWKTIKDGNHPTTGKAIEQSPNNRTVEALAGGNSFSFEIAFENLKEWELGLLIHSLQLEKGLAHKLGMAKSMGFGSVEIDVESVRLRKDWKQWRNGNSEIPNWLGKGFAKLKEWFRDELDFIENLKKLLWFPEGDQAPRVCYPMLRKKDDPNGNSGYEELKDGEFKKEDRQKKLTTPWTPWAMAMQAAKRANIRLPPEVNRILYIRNLPYKITAEEMYDIFGKYGPIRQIRVGNTPETRGTAYVVYEDIFDAKNACDHLSGFNVCNRYLVVLYYNANRAFQKMDTKKKEEQLKLLKEKYGINTDPPKKRTADGSEFESPKKKRKV

SEQ ID NO: 524 - protein, 1566 aa, synthetic construct
MKRTADGSEFESPKKKRKVTTTMKISIEFLEPFRMTKWQESTRRNKNNKEFVRGQAFARWHRNKKDNTKGRPYITGTLLRSAVIRSAENLLTLSDGKISEKTCCPGKFDTEDKDRLLQLRQRSTLRWTDKNPCPDNAETYCPFCELLGRSGNDGKKAEKKDWRFRIHFGNLSLPGKPDFDGPKAIGSQRVLNRVDFKSGKAHDFFKAYEVDHTRFPRFEGEITIDNKVSAEARKLLCDSLKFTDRLCGALCVIRFDEYTPAADSGKQTENVQAEPNANLAEKTAEQIISILDDNKKTEYTRLLADAIRSLRRSSKLVAGLPKDHDGKDDHYLWDIGKKKKDENSVTIRQILTTSADTKELKNAGKWREFCEKLGEALYLKSKDMSGGLKITRRILGDAEFHGKPDRLEKSRSVSIGSVLKETVVCGELVAKTPFFFGAIDEDAKQTDLQVLLTPDNKYRLPRSAVRGILRRDLQTYFDSPCNAELGGRPCMCKTCRIMRGITVMDARSEYNAPPEIRHRTRINPFTGTVAEGALFNMEVAPEGIVFPFQLRYRGSEDGLPDALKTVLKWWAEGQAFMSGAASTGKGRFRMENAKYETLDLSDENQRNDYLKNWGWRDEKGLEELKKRLNSGLPEPGNYRDPKWHEINVSIEMASPFINGDPIRAAVDKRGTDVVTFVKYKAEGEEAKPVCAYKAESFRGVIRSAVARIHMEDGVPLTELTHSDCECLLCQIFGSEYEAGKIRFEDLVFESDPEPVTFDHVAIDRFTGGAADKKKFDDSPLPGSPARPLMLKGSFWIRRDVLEDEEYCKALGKALADVNNGLYPLGGKSAIGYGQVKSLGIKGDDKRISRLMNPAFDETDVAVPEKPKTDAEVRIEAEKVYYPHYFVEPHKKVEREEKPCGHQKFHEGRLTGKIRCKLITKTPLIVPDTSNDDFFRPADKEARKEKDEYHKSYAFFRLHKQIMIPGSELRGMVSSVYETVTNSCFRIFDETKRLSWRGGGSRTVDDRMIGKRMSADLRPCHGDWVEDGDLSALNAYPEKRLLLRHPKGLCPACRLFGTGSYKGRVRFGFASLENDPEWLIPGKNPGDPFHGGPVMLSLLERPRPTWSIPGSDNKFKVPGRKFYVHHHAWKTIKDGNHPTTGKAIEQSPNNRTVEALAGGNSFSFEIAFENLKEWELGLLIHSLQLEKGLAHKLGMAKSMGFGSVEIDVESVRLRKDWKQWRNGNSEIPNWLGKGFAKLKEWFRDELDFIENLKKLLWFPEGDQAPRVCYPMLRKKDDPNGNSGYEELKDGEFKKEDRQKKLTTPWTPWAMAEYLASIFGTEKDKVNCSFYFKIGACRHGDRCSRLHNKPTFSQTIALLNIYRNPQNSSQSADGLRCAVSDVEMQEHYDEFFEEVFTEMEEKYGEVEEMNVCDNLGDHLVGNVYVKFRREEDAEKAVIDLNNRWFNGQPIHAELSPVTDFREACCRQYEMGECTRGGFCNFMHLKPISRELRRELYGRRRKKHRSRSRSRERRSRSRDRGRGGGGGGGGGGGGRERDRRRSRDRERSGRFKRTADGSEFESPKKKRKV

SEQ ID NO: 525 - protein, 1801 aa, synthetic construct
MKRTADGSEFESPKKKRKVTTTMKISIEFLEPFRMTKWQESTRRNKNNKEFVRGQAFARWHRNKKDNTKGRPYITGTLLRSAVIRSAENLLTLSDGKISEKTCCPGKFDTEDKDRLLQLRQRSTLRWTDKNPCPDNAETYCPFCELLGRSGNDGKKAEKKDWRFRIHFGNLSLPGKPDFDGPKAIGSQRVLNRVDFKSGKAHDFFKAYEVDHTRFPRFEGEITIDNKVSAEARKLLCDSLKFTDRLCGALCVIRFDEYTPAADSGKQTENVQAEPNANLAEKTAEQIISILDDNKKTEYTRLLADAIRSLRRSSKLVAGLPKDHDGKDDHYLWDIGKKKKDENSVTIRQILTTSADTKELKNAGKWREFCEKLGEALYLKSKDMSGGLKITRRILGDAEFHGKPDRLEKSRSVSIGSVLKETVVCGELVAKTPFFFGAIDEDAKQTDLQVLLTPDNKYRLPRSAVRGILRRDLQTYFDSPCNAELGGRPCMCKTCRIMRGITVMDARSEYNAPPEIRHRTRINPFTGTVAEGALFNMEVAPEGIVFPFQLRYRGSEDGLPDALKTVLKWWAEGQAFMSGAASTGKGRFRMENAKYETLDLSDENQRNDYLKNWGWRDEKGLEELKKRLNSGLPEPGNYRDPKWHEINVSIEMASPFINGDPIRAAVDKRGTDVVTFVKYKAEGEEAKPVCAYKAESFRGVIRSAVARIHMEDGVPLTELTHSDCECLLCQIFGSEYEAGKIRFEDLVFESDPEPVTFDHVAIDRFTGGAADKKKFDDSPLPGSPARPLMLKGSFWIRRDVLEDEEYCKALGKALADVNNGLYPLGGKSAIGYGQVKSLGIKGDDKRISRLMNPAFDETDVAVPEKPKTDAEVRIEAEKVYYPHYFVEPHKKVEREEKPCGHQKFHEGRLTGKIRCKLITKTPLIVPDTSNDDFFRPADKEARKEKDEYHKSYAFFRLHKQIMIPGSELRGMVSSVYETVTNSCFRIFDETKRLSWRGGGSRTVDDRMIGKRMSADLRPCHGDWVEDGDLSALNAYPEKRLLLRHPKGLCPACRLFGTGSYKGRVRFGFASLENDPEWLIPGKNPGDPFHGGPVMLSLLERPRPTWSIPGSDNKFKVPGRKFYVHHHAWKTIKDGNHPTTGKAIEQSPNNRTVEALAGGNSFSFEIAFENLKEWELGLLIHSLQLEKGLAHKLGMAKSMGFGSVEIDVESVRLRKDWKQWRNGNSEIPNWLGKGFAKLKEWFRDELDFIENLKKLLWFPEGDQAPRVCYPMLRKKDDPNGNSGYEELKDGEFKKEDRQKKLTTPWTPWAMSDFDEFERQLNENKQERDKENRHRKRSHSRSRSRDRKRRSRSRDRRNRDQRSASRDRRRRSKPLTRGAKEEHGGLIRSPRHEKKKKVRKYWDVPPPGFEHITPMQYKAMQAAGQIPATALLPTMTPDGLAVTPTPVPVVGSQMTRQARRLYVGNIPFGITEEAMMDFFNAQMRLGGLTQAPGNPVLAVQINQDKNFAFLEFRSVDETTQAMAFDGIIFQGQSLKIRRPHDYQPLPGMSENPSVYVPGVVSTVVPDSAHKLFIGGLPNYLNDDQVKELLTSFGPLKAFNLVKDSATGLSKGYAFCEYVDINVTDQAIAGLNGMQLGDKKLLVQRASVGAKNATLVSPPSTINQTPVTLQVPGLMSSQVQMGGHPTEVLCLMNMVLPEELLDDEEYEEIVEDVRDECSKYGLVKSIEIPRPVDGVEVPGCGKIFVEFTSVFDCQKAMQGLTGRKFANRVVVTKYCDPDSYHRRDFWKRTADGSEFESPKKKRKV

SEQ ID NO: 526 - protein, 1727 aa, synthetic construct
MKRTADGSEFESPKKKRKVTTTMKISIEFLEPFRMTKWQESTRRNKNNKEFVRGQAFARWHRNKKDNTKGRPYITGTLLRSAVIRSAENLLTLSDGKISEKTCCPGKFDTEDKDRLLQLRQRSTLRWTDKNPCPDNAETYCPFCELLGRSGNDGKKAEKKDWRFRIHFGNLSLPGKPDFDGPKAIGSQRVLNRVDFKSGKAHDFFKAYEVDHTRFPRFEGEITIDNKVSAEARKLLCDSLKFTDRLCGALCVIRFDEYTPAADSGKQTENVQAEPNANLAEKTAEQIISILDDNKKTEKTRLLADAIRSLRRSSKLVAGLPKDHDGKDDHYLWDIGKKKKDENSVTIRQILTTSADTKELKNAGKWREFCEKLGEALYLKSKDMSGGLKITRRILGDAEFHGKPDRLEKSRSVSIGSVLKETVVCGELVAKTPFFFGAIDEDAKQTDLQVLLTPDNKYRLPRSAVRGILRRDLQTYFDSPCNAELGGRPCMCKTCRIMRGITVMDARSEYNAPPEIRHRTRINPFTGTVAEGALFNMEVAPEGIVFPFQLRYRGSEDGLPDALKTVLKWWAEGQAFMSGAASTGKGRFRMENAKYETLDLSDENQRNDYLKNWGWRDEKGLEELKKRLNSGLPEPGNYRDPKWHEINVSIEMASPFINGDPIRAAVDKRGTDVVTFVKYKAEGEEAKPVCAYKAESFRGVIRSAVARIHMEDGVPLTELTHSDCECLLCQIFGSEYEAGKIRFEDLVFESDPEPVTFDHVAIDRFTGGAADKKKFDDSPLPGSPARPLMLKGSFWIRRDVLEDEEYCKALGKALADVNNGLYPLGGKSAIGYGQVKSLGIKGDDKRISRLMNPAFDETDVAVPEKPKTDAEVRIEAEKVYYPHYFVEPHKKVEREEKPCGHQKFHEGRLTGKIRCKLITKTPLIVPDTSNDDFFRPADKEARKEKDEYHKSYAFFRLHKQIMIPGSELRGMVSSVYETVTNSCFRIFDETKRLSWRGGGSRTVDDRMIGKRMSADLRPCHGDWVEDGDLSALNAYPEKRLLLRHPKGLCPACRLFGTGSYKGRVRFGFASLENDPEWLIPGKNPGDPFHGGPVMLSLLERPRPTWSIPGSDNKFKVPGRKFYVHHHAWKTIKDGNHPTTGKAIEQSPNNRTVEALAGGNSFSFEIAFENLKEWELGLLIHSLQLEKGLAHKLGMAKSMGFGSVEIDVESVRLRKDWKQWRNGNSEIPNWLGKGFAKLKEWFRDELDFIENLKKLLWFPEGDQAPRVCYPMLRKKDDPNGNSGYEELKRGEFKKEDRQKKLTTPWTPWAMSLYDDLGVETSDSKTEGWSKNFKLLQSQLQVKKAALTQAKSQRTKQSTVLAPVIDLKRGGSSDDRQIVDTPPHVAAGLKDPVPSGFSAGEVLIPLADEYDPMFPNDYEKVVKRQREERQRQRELERQKEIEEREKRRKDRHEASGFARRPDPDSDEDEDYERERRKRSMGGAAIAPPTSLVEKDKELPRDFPYEEDSRPRSQSSKAAIPPPVYEEQDRPRSPTGPSNSFLANMGGTVAHKIMQKYGFREGQGLGKHEQGLSTALSVEKTSKRGGKIIVGDATEKDASKKSDSNPLTEILKCPTKVVLLRNMVGAGEVDEDLEVETKEECEKYGKVGKCVIFEIPGAPDDEAVRIFLEFERVESAIKAVVDLNGRYFGGRVVKACFYNLDKFRVLDLAEQVKRTADGSEFESPKKKRKV

SEQ ID NO: 527 - protein, 1451 aa, synthetic construct
MKRTADGSEFESPKKKRKVTTTMKISIEFLEPFRMTKWQESTRRNKNNKEFVRGQAFARWHRNKKDNTKGRPYITGTLLRSAVIRSAENLLTLSDGKISEKTCCPGKFDTEDKDRLLQLRQRSTLRWTDKNPCPDNAETYCPFCELLGRSGNDGKKAEKKDWRFRIHFGNLSLPGKPDFDGPKAIGSQRVLNRVDFKSGKAHDFFKAYEVDHTRFPRFEGEITIDNKVSAEARKLLCDSLKFTDRLCGALCVIRFDEYTPAADSGKQTENVQAEPNANLAEKTAEQIISILDDNKKTEKTRLLADAIRSLRRSSKLVAGLPKDHDGKDDHYLWDIGKKKKDENSVTIRQILTTSADTKELKNAGKWREFCEKLGEALYLKSKDMSGGLKITRRILGDAEFHGKPDRLEKSRSVSIGSVLKETVVCGELVAKTPFFFGAIDEDAKQTDLQVLLTPDNKYRLPRSAVRGILRRDLQTYFDSPCNAELGGRPCMCKTCRIMRGITVMDARSEYNAPPEIRHRTRINPFTGTVAEGALFNMEVAPEGIVFPFQLRYRGSEDGLPDALKTVLKWWAEGQAFMSGAASTGKGRFRMENAKYETLDLSDENQRNDYLKNWGWRDEKGLEELKKRLNSGLPEPGNYRDPKWHEINVSIEMASPFINGDPIRAAVDKRGTDVVTFVKYKAEGEEAKPVCAYKAESFRGVIRSAVARIHMEDGVPLTELTHSDCECLLCQIFGSEYEAGKIRFEDLVFESDPEPVTFDHVAIDRFTGGAADKKKFDDSPLPGSPARPLMLKGSFWIRRDVLEDEEYCKALGKALADVNNGLYPLGGKSAIGYGQVKSLGIKGDDKRISRLMNPAFDETDVAVPEKPKTDAEVRIEAEKVYYPHYFVEPHKKVEREEKPCGHQKFHEGRLTGKIRCKLITKTPLIVPDTSNDDFFRPADKEARKEKDEYHKSYAFFRLHKQIMIPGSELRGMVSSVYETVTNSCFRIFDETKRLSWRGGGSRTVDDRMIGKRMSADLRPCHGDWVEDGDLSALNAYPEKRLLLRHPKGLCPACRLFGTGSYKGRVRFGFASLENDPEWLIPGKNPGDPFHGGPVMLSLLERPRPTWSIPGSDNKFKVPGRKFYVHHHAWKTIKDGNHPTTGKAIEQSPNNRTVEALAGGNSFSFEIAFENLKEWELGLLIHSLQLEKGLAHKLGMAKSMGFGSVEIDVESVRLRKDWKQWRNGNSEIPNWLGKGFAKLKEWFRDELDFIENLKKLLWFPEGDQAPRVCYPMLRKKDDPNGNSGYEELKRGEFKKEDRQKKLTTPWTPWAMAMQAAKRANIRLPPEVNRILYIRNLPYKITAEEMYDIFGKYGPIRQIRVGNTPETRGTAYVVYEDIFDAKNACDHLSGFNVCNRYLVVLYYNANRAFQKMDTKKKEEQLKLLKEKYGINTDPPKKRTADGSEFESPKKKRKV

SEQ ID NO: 528 - protein, 1566 aa, synthetic construct
MKRTADGSEFESPKKKRKVTTTMKISIEFLEPFRMTKWQESTRRNKNNKEFVRGQAFARWHRNKKDNTKGRPYITGTLLRSAVIRSAENLLTLSDGKISEKTCCPGKFDTEDKDRLLQLRQRSTLRWTDKNPCPDNAETYCPFCELLGRSGNDGKKAEKKDWRFRIHFGNLSLPGKPDFDGPKAIGSQRVLNRVDFKSGKAHDFFKAYEVDHTRFPRFEGEITIDNKVSAEARKLLCDSLKFTDRLCGALCVIRFDEYTPAADSGKQTENVQAEPNANLAEKTAEQIISILDDNKKTEKTRLLADAIRSLRRSSKLVAGLPKDHDGKDDHYLWDIGKKKKDENSVTIRQILTTSADTKELKNAGKWREFCEKLGEALYLKSKDMSGGLKITRRILGDAEFHGKPDRLEKSRSVSIGSVLKETVVCGELVAKTPFFFGAIDEDAKQTDLQVLLTPDNKYRLPRSAVRGILRRDLQTYFDSPCNAELGGRPCMCKTCRIMRGITVMDARSEYNAPPEIRHRTRINPFTGTVAEGALFNMEVAPEGIVFPFQLRYRGSEDGLPDALKTVLKWWAEGQAFMSGAASTGKGRFRMENAKYETLDLSDENQRNDYLKNWGWRDEKGLEELKKRLNSGLPEPGNYRDPKWHEINVSIEMASPFINGDPIRAAVDKRGTDVVTFVKYKAEGEEAKPVCAYKAESFRGVIRSAVARIHMEDGVPLTELTHSDCECLLCQIFGSEYEAGKIRFEDLVFESDPEPVTFDHVAIDRFTGGAADKKKFDDSPLPGSPARPLMLKGSFWIRRDVLEDEEYCKALGKALADVNNGLYPLGGKSAIGYGQVKSLGIKGDDKRISRLMNPAFDETDVAVPEKPKTDAEVRIEAEKVYYPHYFVEPHKKVEREEKPCGHQKFHEGRLTGKIRCKLITKTPLIVPDTSNDDFFRPADKEARKEKDEYHKSYAFFRLHKQIMIPGSELRGMVSSVYETVTNSCFRIFDETKRLSWRGGGSRTVDDRMIGKRMSADLRPCHGDWVEDGDLSALNAYPEKRLLLRHPKGLCPACRLFGTGSYKGRVRFGFASLENDPEWLIPGKNPGDPFHGGPVMLSLLERPRPTWSIPGSDNKFKVPGRKFYVHHHAWKTIKDGNHPTTGKAIEQSPNNRTVEALAGGNSFSFEIAFENLKEWELGLLIHSLQLEKGLAHKLGMAKSMGFGSVEIDVESVRLRKDWKQWRNGNSEIPNWLGKGFAKLKEWFRDELDFIENLKKLLWFPEGDQAPRVCYPMLRKKDDPNGNSGYEELKRGEFKKEDRQKKLTTPWTPWAMAEYLASIFGTEKDKVNCSFYFKIGACRHGDRCSRLHNKPTFSQTIALLNIYRNPQNSSQSADGLRCAVSDVEMQEHYDEFFEEVFTEMEEKYGEVEEMNVCDNLGDHLVGNVYVKFRREEDAEKAVIDLNNRWFNGQPIHAELSPVTDFREACCRQYEMGECTRGGFCNFMHLKPISRELRRELYGRRRKKHRSRSRSRERRSRSRDRGRGGGGGGGGGGGGRERDRRRSRDRERSGRFKRTADGSEFESPKKKRKV

SEQ ID NO: 529 - protein, 1801 aa, synthetic construct
MKRTADGSEFESPKKKRKVTTTMKISIEFLEPFRMTKWQESTRRNKNNKEFVRGQAFARWHRNKKDNTKGRPYITGTLLRSAVIRSAENLLTLSDGKISEKTCCPGKFDTEDKDRLLQLRQRSTLRWTDKNPCPDNAETYCPFCELLGRSGNDGKKAEKKDWRFRIHFGNLSLPGKPDFDGPKAIGSQRVLNRVDFKSGKAHDFFKAYEVDHTRFPRFEGEITIDNKVSAEARKLLCDSLKFTDRLCGALCVIRFDEYTPAADSGKQTENVQAEPNANLAEKTAEQIISILDDNKKTEKTRLLADAIRSLRRSSKLVAGLPKDHDGKDDHYLWDIGKKKKDENSVTIRQILTTSADTKELKNAGKWREFCEKLGEALYLKSKDMSGGLKITRRILGDAEFHGKPDRLEKSRSVSIGSVLKETVVCGELVAKTPFFFGAIDEDAKQTDLQVLLTPDNKYRLPRSAVRGILRRDLQTYFDSPCNAELGGRPCMCKTCRIMRGITVMDARSEYNAPPEIRHRTRINPFTGTVAEGALFNMEVAPEGIVFPFQLRYRGSEDGLPDALKTVLKWWAEGQAFMSGAASTGKGRFRMENAKYETLDLSDENQRNDYLKNWGWRDEKGLEELKKRLNSGLPEPGNYRDPKWHEINVSIEMASPFINGDPIRAAVDKRGTDVVTFVKYKAEGEEAKPVCAYKAESFRGVIRSAVARIHMEDGVPLTELTHSDCECLLCQIFGSEYEAGKIRFEDLVFESDPEPVTFDHVAIDRFTGGAADKKKFDDSPLPGSPARPLMLKGSFWIRRDVLEDEEYCKALGKALADVNNGLYPLGGKSAIGYGQVKSLGIKGDDKRISRLMNPAFDETDVAVPEKPKTDAEVRIEAEKVYYPHYFVEPHKKVEREEKPCGHQKFHEGRLTGKIRCKLITKTPLIVPDTSNDDFFRPADKEARKEKDEYHKSYAFFRLHKQIMIPGSELRGMVSSVYETVTNSCFRIFDETKRLSWRGGGSRTVDDRMIGKRMSADLRPCHGDWVEDGDLSALNAYPEKRLLLRHPKGLCPACRLFGTGSYKGRVRFGFASLENDPEWLIPGKNPGDPFHGGPVMLSLLERPRPTWSIPGSDNKFKVPGRKFYVHHHAWKTIKDGNHPTTGKAIEQSPNNRTVEALAGGNSFSFEIAFENLKEWELGLLIHSLQLEKGLAHKLGMAKSMGFGSVEIDVESVRLRKDWKQWRNGNSEIPNWLGKGFAKLKEWFRDELDFIENLKKLLWFPEGDQAPRVCYPMLRKKDDPNGNSGYEELKRGEFKKEDRQKKLTTPWTPWAMSDFDEFERQLNENKQERDKENRHRKRSHSRSRSRDRKRRSRSRDRRNRDQRSASRDRRRRSKPLTRGAKEEHGGLIRSPRHEKKKKVRKYWDVPPPGFEHITPMQYKAMQAAGQIPATALLPTMTPDGLAVTPTPVPVVGSQMTRQARRLYVGNIPFGITEEAMMDFFNAQMRLGGLTQAPGNPVLAVQINQDKNFAFLEFRSVDETTQAMAFDGIIFQGQSLKIRRPHDYQPLPGMSENPSVYVPGVVSTVVPDSAHKLFIGGLPNYLNDDQVKELLTSFGPLKAFNLVKDSATGLSKGYAFCEYVDINVTDQAIAGLNGMQLGDKKLLVQRASVGAKNATLVSPPSTINQTPVTLQVPGLMSSQVQMGGHPTEVLCLMNMVLPEELLDDEEYEEIVEDVRDECSKYGLVKSIEIPRPVDGVEVPGCGKIFVEFTSVFDCQKAMQGLTGRKFANRVVVTKYCDPDSYHRRDFWKRTADGSEFESPKKKRKV

SEQ ID NO: 530 - protein, 1727 aa, synthetic construct
MKRTADGSEFESPKKKRKVTTTMKISIEFLEPFRMTKWQESTRRNKNNKEFVRGQAFARWHRNKKDNTKGRPYITGTLLRSAVIRSAENLLTLSDGKISEKTCCPGKFDTEDKDRLLQLRQRSTLRWTDKNPCPDNAETYCPFCELLGRSGNDGKKAEKKDWRFRIHFGNLSLPGKPDFDGPKAIGSQRVLNRVDFKSGKAHDFFKAYEVDHTRFPRFEGEITIDNKVSAEARKLLCDSLKFTDRLCGALCVIRFDEYTPAADSGKQTENVQAEPNANLAEKTAEQIISILDDNKKTRYTRLLADAIRSLRRSSKLVAGLPKDHDGKDDHYLWDIGKKKKDENSVTIRQILTTSADTKELKNAGKWREFCEKLGEALYLKSKDMSGGLKITRRILGDAEFHGKPDRLEKSRSVSIGSVLKETVVCGELVAKTPFFFGAIDEDAKQTDLQVLLTPDNKYRLPRSAVRGILRRDLQTYFDSPCNAELGGRPCMCKTCRIMRGITVMDARSEYNAPPEIRHRTRINPFTGTVAEGALFNMEVAPEGIVFPFQLRYRGSEDGLPDALKTVLKWWAEGQAFMSGAASTGKGRFRMENAKYETLDLSDENQRNDYLKNWGWRDEKGLEELKKRLNSGLPEPGNYRDPKWHEINVSIEMASPFINGDPIRAAVDKRGTDVVTFVKYKAEGEEAKPVCAYKAESFRGVIRSAVARIHMEDGVPLTELTHSDCECLLCQIFGSEYEAGKIRFEDLVFESDPEPVTFDHVAIDRFTGGAADKKKFDDSPLPGSPARPLMLKGSFWIRRDVLEDEEYCKALGKALADVNNGLYPLGGKSAIGYGQVKSLGIKGDDKRISRLMNPAFDETDVAVPEKPKTDAEVRIEAEKVYYPHYFVEPHKKVEREEKPCGHQKFHEGRLTGKIRCKLITKTPLIVPDTSNDDFFRPADKEARKEKDEYHKSYAFFRLHKQIMIPGSELRGMVSSVYETVTNSCFRIFDETKRLSWRGGGSRTVDDRMIGKRMSADLRPCHGDWVEDGDLSALNAYPEKRLLLRHPKGLCPACRLFGTGSYKGRVRFGFASLENDPEWLIPGKNPGDPFHGGPVMLSLLERPRPTWSIPGSDNKFKVPGRKFYVHHHAWKTIKDGNHPTTGKAIEQSPNNRTVEALAGGNSFSFEIAFENLKEWELGLLIHSLQLEKGLAHKLGMAKSMGFGSVEIDVESVRLRKDWKQWRNGNSEIPNWLGKGFAKLKEWFRDELDFIENLKKLLWFPEGDQAPRVCYPMLRKKDDPNGNSGYEELKRGEFKKEDRQKKLTTPWTPWAMSLYDDLGVETSDSKTEGWSKNFKLLQSQLQVKKAALTQAKSQRTKQSTVLAPVIDLKRGGSSDDRQIVDTPPHVAAGLKDPVPSGFSAGEVLIPLADEYDPMFPNDYEKVVKRQREERQRQRELERQKEIEEREKRRKDRHEASGFARRPDPDSDEDEDYERERRKRSMGGAAIAPPTSLVEKDKELPRDFPYEEDSRPRSQSSKAAIPPPVYEEQDRPRSPTGPSNSFLANMGGTVAHKIMQKYGFREGQGLGKHEQGLSTALSVEKTSKRGGKIIVGDATEKDASKKSDSNPLTEILKCPTKVVLLRNMVGAGEVDEDLEVETKEECEKYGKVGKCVIFEIPGAPDDEAVRIFLEFERVESAIKAVVDLNGRYFGGRVVKACFYNLDKFRVLDLAEQVKRTADGSEFESPKKKRKV

SEQ ID NO: 531 - protein, 1451 aa, synthetic construct
MKRTADGSEFESPKKKRKVTTTMKISIEFLEPFRMTKWQESTRRNKNNKEFVRGQAFARWHRNKKDNTKGRPYITGTLLRSAVIRSAENLLTLSDGKISEKTCCPGKFDTEDKDRLLQLRQRSTLRWTDKNPCPDNAETYCPFCELLGRSGNDGKKAEKKDWRFRIHFGNLSLPGKPDFDGPKAIGSQRVLNRVDFKSGKAHDFFKAYEVDHTRFPRFEGEITIDNKVSAEARKLLCDSLKFTDRLCGALCVIRFDEYTPAADSGKQTENVQAEPNANLAEKTAEQIISILDDNKKTRYTRLLADAIRSLRRSSKLVAGLPKDHDGKDDHYLWDIGKKKKDENSVTIRQILTTSADTKELKNAGKWREFCEKLGEALYLKSKDMSGGLKITRRILGDAEFHGKPDRLEKSRSVSIGSVLKETVVCGELVAKTPFFFGAIDEDAKQTDLQVLLTPDNKYRLPRSAVRGILRRDLQTYFDSPCNAELGGRPCMCKTCRIMRGITVMDARSEYNAPPEIRHRTRINPFTGTVAEGALFNMEVAPEGIVFPFQLRYRGSEDGLPDALKTVLKWWAEGQAFMSGAASTGKGRFRMENAKYETLDLSDENQRNDYLKNWGWRDEKGLEELKKRLNSGLPEPGNYRDPKWHEINVSIEMASPFINGDPIRAAVDKRGTDVVTFVKYKAEGEEAKPVCAYKAESFRGVIRSAVARIHMEDGVPLTELTHSDCECLLCQIFGSEYEAGKIRFEDLVFESDPEPVTFDHVAIDRFTGGAADKKKFDDSPLPGSPARPLMLKGSFWIRRDVLEDEEYCKALGKALADVNNGLYPLGGKSAIGYGQVKSLGIKGDDKRISRLMNPAFDETDVAVPEKPKTDAEVRIEAEKVYYPHYFVEPHKKVEREEKPCGHQKFHEGRLTGKIRCKLITKTPLIVPDTSNDDFFRPADKEARKEKDEYHKSYAFFRLHKQIMIPGSELRGMVSSVYETVTNSCFRIFDETKRLSWRGGGSRTVDDRMIGKRMSADLRPCHGDWVEDGDLSALNAYPEKRLLLRHPKGLCPACRLFGTGSYKGRVRFGFASLENDPEWLIPGKNPGDPFHGGPVMLSLLERPRPTWSIPGSDNKFKVPGRKFYVHHHAWKTIKDGNHPTTGKAIEQSPNNRTVEALAGGNSFSFEIAFENLKEWELGLLIHSLQLEKGLAHKLGMAKSMGFGSVEIDVESVRLRKDWKQWRNGNSEIPNWLGKGFAKLKEWFRDELDFIENLKKLLWFPEGDQAPRVCYPMLRKKDDPNGNSGYEELKRGEFKKEDRQKKLTTPWTPWAMAMQAAKRANIRLPPEVNRILYIRNLPYKITAEEMYDIFGKYGPIRQIRVGNTPETRGTAYVVYEDIFDAKNACDHLSGFNVCNRYLVVLYYNANRAFQKMDTKKKEEQLKLLKEKYGINTDPPKKRTADGSEFESPKKKRKV

SEQ ID NO: 532 - protein, 1566 aa, synthetic construct
MKRTADGSEFESPKKKRKVTTTMKISIEFLEPFRMTKWQESTRRNKNNKEFVRGQAFARWHRNKKDNTKGRPYITGTLLRSAVIRSAENLLTLSDGKISEKTCCPGKFDTEDKDRLLQLRQRSTLRWTDKNPCPDNAETYCPFCELLGRSGNDGKKAEKKDWRFRIHFGNLSLPGKPDFDGPKAIGSQRVLNRVDFKSGKAHDFFKAYEVDHTRFPRFEGEITIDNKVSAEARKLLCDSLKFTDRLCGALCVIRFDEYTPAADSGKQTENVQAEPNANLAEKTAEQIISILDDNKKTRYTRLLADAIRSLRRSSKLVAGLPKDHDGKDDHYLWDIGKKKKDENSVTIRQILTTSADTKELKNAGKWREFCEKLGEALYLKSKDMSGGLKITRRILGDAEFHGKPDRLEKSRSVSIGSVLKETVVCGELVAKTPFFFGAIDEDAKQTDLQVLLTPDNKYRLPRSAVRGILRRDLQTYFDSPCNAELGGRPCMCKTCRIMRGITVMDARSEYNAPPEIRHRTRINPFTGTVAEGALFNMEVAPEGIVFPFQLRYRGSEDGLPDALKTVLKWWAEGQAFMSGAASTGKGRFRMENAKYETLDLSDENQRNDYLKNWGWRDEKGLEELKKRLNSGLPEPGNYRDPKWHEINVSIEMASPFINGDPIRAAVDKRGTDVVTFVKYKAEGEEAKPVCAYKAESFRGVIRSAVARIHMEDGVPLTELTHSDCECLLCQIFGSEYEAGKIRFEDLVFESDPEPVTFDHVAIDRFTGGAADKKKFDDSPLPGSPARPLMLKGSFWIRRDVLEDEEYCKALGKALADVNNGLYPLGGKSAIGYGQVKSLGIKGDDKRISRLMNPAFDETDVAVPEKPKTDAEVRIEAEKVYYPHYFVEPHKKVEREEKPCGHQKFHEGRLTGKIRCKLITKTPLIVPDTSNDDFFRPADKEARKEKDEYHKSYAFFRLHKQIMIPGSELRGMVSSVYETVTNSCFRIFDETKRLSWRGGGSRTVDDRMIGKRMSADLRPCHGDWVEDGDLSALNAYPEKRLLLRHPKGLCPACRLFGTGSYKGRVRFGFASLENDPEWLIPGKNPGDPFHGGPVMLSLLERPRPTWSIPGSDNKFKVPGRKFYVHHHAWKTIKDGNHPTTGKAIEQSPNNRTVEALAGGNSFSFEIAFENLKEWELGLLIHSLQLEKGLAHKLGMAKSMGFGSVEIDVESVRLRKDWKQWRNGNSEIPNWLGKGFAKLKEWFRDELDFIENLKKLLWFPEGDQAPRVCYPMLRKKDDPNGNSGYEELKRGEFKKEDRQKKLTTPWTPWAMAEYLASIFGTEKDKVNCSFYFKIGACRHGDRCSRLHNKPTFSQTIALLNIYRNPQNSSQSADGLRCAVSDVEMQEHYDEFFEEVFTEMEEKYGEVEEMNVCDNLGDHLVGNVYVKFRREEDAEKAVIDLNNRWFNGQPIHAELSPVTDFREACCRQYEMGECTRGGFCNFMHLKPISRELRRELYGRRRKKHRSRSRSRERRSRSRDRGRGGGGGGGGGGGGRERDRRRSRDRERSGRFKRTADGSEFESPKKKRKV

SEQ ID NO: 533 - protein, 1801 aa, synthetic construct
MKRTADGSEFESPKKKRKVTTTMKISIEFLEPFRMTKWQESTRRNKNNKEFVRGQAFARWHRNKKDNTKGRPYITGTLLRSAVIRSAENLLTLSDGKISEKTCCPGKFDTEDKDRLLQLRQRSTLRWTDKNPCPDNAETYCPFCELLGRSGNDGKKAEKKDWRFRIHFGNLSLPGKPDFDGPKAIGSQRVLNRVDFKSGKAHDFFKAYEVDHTRFPRFEGEITIDNKVSAEARKLLCDSLKFTDRLCGALCVIRFDEYTPAADSGKQTENVQAEPNANLAEKTAEQIISILDDNKKTRYTRLLADAIRSLRRSSKLVAGLPKDHDGKDDHYLWDIGKKKKDENSVTIRQILTTSADTKELKNAGKWREFCEKLGEALYLKSKDMSGGLKITRRILGDAEFHGKPDRLEKSRSVSIGSVLKETVVCGELVAKTPFFFGAIDEDAKQTDLQVLLTPDNKYRLPRSAVRGILRRDLQTYFDSPCNAELGGRPCMCKTCRIMRGITVMDARSEYNAPPEIRHRTRINPFTGTVAEGALFNMEVAPEGIVFPFQLRYRGSEDGLPDALKTVLKWWAEGQAFMSGAASTGKGRFRMENAKYETLDLSDENQRNDYLKNWGWRDEKGLEELKKRLNSGLPEPGNYRDPKWHEINVSIEMASPFINGDPIRAAVDKRGTDVVTFVKYKAEGEEAKPVCAYKAESFRGVIRSAVARIHMEDGVPLTELTHSDCECLLCQIFGSEYEAGKIRFEDLVFESDPEPVTFDHVAIDRFTGGAADKKKFDDSPLPGSPARPLMLKGSFWIRRDVLEDEEYCKALGKALADVNNGLYPLGGKSAIGYGQVKSLGIKGDDKRISRLMNPAFDETDVAVPEKPKTDAEVRIEAEKVYYPHYFVEPHKKVEREEKPCGHQKFHEGRLTGKIRCKLITKTPLIVPDTSNDDFFRPADKEARKEKDEYHKSYAFFRLHKQIMIPGSELRGMVSSVYETVTNSCFRIFDETKRLSWRGGGSRTVDDRMIGKRMSADLRPCHGDWVEDGDLSALNAYPEKRLLLRHPKGLCPACRLFGTGSYKGRVRFGFASLENDPEWLIPGKNPGDPFHGGPVMLSLLERPRPTWSIPGSDNKFKVPGRKFYVHHHAWKTIKDGNHPTTGKAIEQSPNNRTVEALAGGNSFSFEIAFENLKEWELGLLIHSLQLEKGLAHKLGMAKSMGFGSVEIDVESVRLRKDWKQWRNGNSEIPNWLGKGFAKLKEWFRDELDFIENLKKLLWFPEGDQAPRVCYPMLRKKDDPNGNSGYEELKRGEFKKEDRQKKLTTPWTPWAMSDFDEFERQLNENKQERDKENRHRKRSHSRSRSRDRKRRSRSRDRRNRDQRSASRDRRRRSKPLTRGAKEEHGGLIRSPRHEKKKKVRKYWDVPPPGFEHITPMQYKAMQAAGQIPATALLPTMTPDGLAVTPTPVPVVGSQMTRQARRLYVGNIPFGITEEAMMDFFNAQMRLGGLTQAPGNPVLAVQINQDKNFAFLEFRSVDETTQAMAFDGIIFQGQSLKIRRPHDYQPLPGMSENPSVYVPGVVSTVVPDSAHKLFIGGLPNYLNDDQVKELLTSFGPLKAFNLVKDSATGLSKGYAFCEYVDINVTDQAIAGLNGMQLGDKKLLVQRASVGAKNATLVSPPSTINQTPVTLQVPGLMSSQVQMGGHPTEVLCLMNMVLPEELLDDEEYEEIVEDVRDECSKYGLVKSIEIPRPVDGVEVPGCGKIFVEFTSVFDCQKAMQGLTGRKFANRVVVTKYCDPDSYHRRDFWKRTADGSEFESPKKKRKV

SEQ ID NO: 534 - protein, 1792 aa, synthetic construct
MKRTADGSEFESPKKKRKVTTTMKISIEFLEPFRMTKWQESTRRNKNNKEFVRGQAFARWHRNKKDNTKGRPYITGTLLRSAVIRSAENLLTLSDGKISEKTCCPGKFDTEDKDRLLQLRQRSTLRWTDKNPCPDNAETYCPFCELLGRSGNDGKKAEKKDWRFRIHFGNLSLPGKPDFDGPKAIGSQRVLNRVDFKSGKAHDFFKAYEVDHTRFPRFEGEITIDNKVSAEARKLLCDSLKFTDRLCGALCVIRFDEYTPAADSGKQTENVQAEPNANLAEKTAEQIISILDDNKKTEYTRLLADAIRSLRRSSKLVAGLPKDHDGKDDHKLWDIGKKKKDENSVTIRQILTTSADTKELKNAGKWREFCEKLGEALYLKSKDMSGGLKITRRILGDAEFHGKPDRLEKSRSVSIGSVLKETVVCGELVAKTPFFFGAIDEDAKQTDLQVLLTPDNKYRLPRSAVRGILRRDLQTYFDSPCNAELGGRPCMCKTCRIMRGITVMDARSEYNAPPEIRHRTRINPFTGTVAEGALFNMEVAPEGIVFPFQLRYRGSEDGLPDALKTVLKWWAEGQAFMSGAASTGKGRFRMENAKYETLDLSDENQRNDYLKNWGWRDEKGLEELKKRLNSGLPEPGNYRDPKWHEINVSIEMASPFINGDPIRAAVDKRGTDVVTFVKYKAEGEEAKPVCAYKAESFRGVIRSAVARIHMEDGVPLTELTHSDCECLLCQIFGSEYEAGKIRFEDLVFESDPEPVTFDHVAIDRFTGGAADKKKFDDSPLPGSPARPLMLKGSFWIRRDVLEDEEYCKALGKALADVNNGLYPLGGKSAIGYGQVKSLGIKGDDKRISRLMNPAFDETDVAVPEKPKTDAEVRIEAEKVYYPHYFVEPHKKVEREEKPCGHQKFHEGRLTGKIRCKLITKTPLIVPDTSNDDFFRPADKEARKEKDEYHKSYAFFRLHKQIMIPGSELRGMVSSVYETVTNSCFRIFDETKRLSWRMDADHQNVLQKFLPGRVTADGKHIQKFSETARVPFYDKTQKHFDILDEQEIAGEKPVRMWVKRFIKRLSLVDPAKHPQKKQDNKWKRRKEGIATFIEQKNGSYYFNVVTNNGCTSFHLWHKPDNFDQEKLEGIQNGEKLDCWVRDSRYQKAFQEIPENDPDGWECKEGYLHVVGPSKVEFSDKKGDVINNFQGTLPSVPNDWKTIRTNDFKNRKRKNEPVFCCEDDKGNYYTMAKYCETFFFDLKENEEYEIPEKARIKYKELLRVYNNNPQAVPESVFQSRVARENVEKLKSGDLVYFKHNEKYVEDIVPVRISRTVDDRMIGKRMSADLRPCHGDWVEDGDLSALNAYPEKRLLLRHPKGLCPACRLFGTGSYKGRVRFGFASLENDPEWLIPGKNPGDPFHGGPVMLSLLERPRPTWSIPGSDNKFKVPGRKFYVHHHAWKTIKDGNHPTTGKAIEQSPNNRTVEALAGGNSFSFEIAFENLKEWELGLLIHSLQLEKGLAHKLGMAKSMGFGSVEIDVESVRLRKDWKQWRNGNSEIPNWLGKGFAKLKEWFRDELDFIENLKKLLWFPEGDQAPRVCYPMLRKKDDPNGNSGYEELKRGEFKKEDRQKKLTTPWTPWAKRTADGSEFESPKKKRKVCTGSGEGRGSLLTCGDVEENPGPMAKPLSQEESTLIERATATINSIPISEDYSVASAALSSDGRIFTGVNVYHFTGGPCAELVVLGTAAAAAAGNLTCIVAIGNENRGILSPCGRCRQVLLDLHPGIKAIVKDSDGQPTAVGIRELLPSGYVWEG

SEQ ID NO: 535 - protein, 1326 aa, synthetic construct
MKRTADGSEFESPKKKRKVTTTMKISIEFLEPFRMTKWQESTRRNKNNKEFVRGQAFARWHRNKKDNTKGRPYITGTLLRSAVIRSAENLLTLSDGKISEKTCCPGKFDTEDKDRLLQLRQRSTLRWTDKNPCPDNAETYCPFCELLGRSGNDGKKAEKKDWRFRIHFGNLSLPGKPDFDGPKAIGSQRVLNRVDFKSGKAHDFFKAYEVDHTRFPRFEGEITIDNKVSAEARKLLCDSLKFTDRLCGALCVIRFDEYTPAADSGKQTENVQAEPNANLAEKTAEQIISILDDNKKTEKTRLLADAIRSLRRSSKLVAGLPKDHDGKDDHYLWDIGKKKKDENSVTIRQILTTSADTKELKNAGKWREFCEKLGEALYLKSKDMSGGLKITRRILGDAEFHGKPDRLEKSRSVSIGSVLKETVVCGELVAKTPFFFGAIDEDAKQTDLQVLLTPDNKYRLPRSAVRGILRRDLQTYFDSPCNAELGGRPCMCKTCRIMRGITVMDARSEYNAPPEIRHRTRINPFTGTVAEGALFNMEVAPEGIVFPFQLRYRGSEDGLPDALKTVLKWWAEGQAFMSGAASTGKGRFRMENAKYETLDLSDENQRNDYLKNWGWRDEKGLEELKKRLNSGLPEPGNYRDPKWHEINVSIEMASPFINGDPIRAAVDKRGTDVVTFVKYKAEGEEAKPVCAYKAESFRGVIRSAVARIHMEDGVPLTELTHSDCECLLCQIFGSEYEAGKIRFEDLVFESDPEPVTFDHVAIDRFTGGAADKKKFDDSPLPGSPARPLMLKGSFWIRRDVLEDEEYCKALGKALADVNNGLYPLGGKSAIGYGQVKSLGIKGDDKRISRLMNPAFDETDVAVPEKPKTDAEVRIEAEKVYYPHYFVEPHKKVEREEKPCGHQKFHEGRLTGKIRCKLITKTPLIVPDTSNDDFFRPADKEARKEKDEYHKSYAFFRLHKQIMIPGSELRGMVSSVYETVTNSCFRIFDETKRLSWRGGGSRTVDDRMIGKRMSADLRPCHGDWVEDGDLSALNAYPEKRLLLRHPKGLCPACRLFGTGSYKGRVRFGFASLENDPEWLIPGKNPGDPFHGGPVMLSLLERPRPTWSIPGSDNKFKVPGRKFYVHHHAWKTIKDGNHPTTGKAIEQSPNNRTVEALAGGNSFSFEIAFENLKEWELGLLIHSLQLEKGLAHKLGMAKSMGFGSVEIDVESVRLRKDWKQWRNGNSEIPNWLGKGFAKLKEWFRDELDFIENLKKLLWFPEGDQAPRVCYPMLRKKDDPNGNSGYEELKRGEFKKEDRQKKLTTPWTPWAKRTADGSEFESPKKKRKV

SEQ ID NO: 536 - DNA, 4587 bp, synthetic construct
  source 1..4587: mol_type = other DNA
atgacgactactatgaagatttcaattgaattcctcgagccgtttcggatgaccaaatggcaggaaagcactaggcgaaacaagaacaacaaggaatttgttcgcggccaagcttttgcaagatggcatagaaataagaaggataacacaaaagggcggccttacataactgggacattgctgcggtccgcagtaattagaagcgcggaaaacctgctgacattgagtgatgggaaaattagcgaaaagacatgttgtcctgggaaatttgatacggaagataaagacaggttgctgcaattgaggcagcggtccacccttcgttggaccgataagaacccctgtccagataacgctgaaacttactgcccgttttgcgaacttctcgggagatccggtaacgatggaaagaaggctgagaagaaggattggcgctttcgtattcattttggcaatctttcccttccagggaagcccgatttcgacgggccaaaagctataggcagccaacgggtacttaacagggtcgatttcaaatccggtaaggcccatgacttctttaaggcttacgaagtcgaccatactaggtttccccgcttcgaaggggagattaccatagataataaagtcagcgctgaagccaggaaactgctctgtgattctctcaagtttacggatcggctgtgtggagctctgtgcgtaatcaggttcgatgaatatacaccagcagccgatagtgggaaacaaaccgaaaatgtccaagcagaaccgaatgctaatctcgctgaaaagaccgcagagcaaattattagcattctggacgataataagaaaaccgaatatacccgcctgcttgctgatgctattcgttcactccgccgctctagtaaacttgtcgctggcttgccaaaggatcatgacgggaaggatgaccattacctctgggatatcggcaagaagaagaaagacgaaaactctgtcactattaggcaaatccttacgacctcagcagacaccaaggaactcaagaatgccggaaaatggagagaattctgcgagaagctgggtgaagcgctgtacctcaagagtaaagacatgagtggcggcctgaaaattactcggagaatactgggcgatgctgaattccatggaaagcccgatcggcttgaaaagagccggtctgtgtcaatcggatctgtgttgaaagaaactgtggtatgcggcgaactggtcgctaaaacgcccttcttcttcggagcgatagacgaagatgcaaaacaaaccgacctgcaagtactcctcactcccgataacaagtatagactgccaagaagcgccgtgcgaggtatactccgtcgagatcttcaaacctattttgatagcccatgcaatgctgagttgggtggacggccatgcatgtgtaagacgtgtaggattatgagagggatcacggtgatggatgcgcgcagtgagtacaatgccccgccagaaataaggcatcgtacccgcattaatcccttcacaggcacggttgcggaaggtgccctgtttaatatggaagtagcccccgaggggattgtctttccatttcaactccggtaccggggctctgaagatgggctgcccgatgcactgaaaacggtgttgaaatggtgggctgaggggcaggcattcatgagtggcgctgcctcaaccgggaagggccgattccggatggaaaatgctaaatatgaaacgctggatctgagcgacgagaatcaaaggaatgactatcttaagaattggggatggcgtgacgagaaggggctcgaggaactgaagaaacgactgaactcaggtctgccagagcccggtaattatagggatccaaaatggcacgagattaacgtttccattgagatggcaagcccttttattaatggcgacccaatccgcgcagccgtggacaaacgtggtacagatgtggttaccttcgttaagtataaagctgaaggggaagaggcgaaacccgtatgtgcatacaaggccgaatcttttagaggggtgatcagaagtgccgtggcacgcattcatatggaagatggcgtccctttgactgagttgactcacagtgactgtgaatgtctcctgtgccaaatctttggaagtgagtatgaagccggcaaaataaggtttgaagatctcgtattcgaaagtgacccggaacctgtgaccttcgatcatgtggccatcgatagattcactggcggtgcagctgataagaagaaattcgatgattcccctctgcccggtagccctgcaagaccgctcatgttgaaaggctccttctggatccgcagggacgttctcgaggacgaagagtactgtaaggcactcggtaaggctcttgcagatgtgaataatggcctttatcccctcggtggaaagagcgccatcggctacggacaggtcaagagtctgggtataaagggagatgataagaggatttctcgcctcatgaatcctgcctttgatgagacagatgtagccgttccagaaaagcccaaaactgatgccgaggttcgcatcgaggcagagaaagtatattacccacactatttcgtcgaaccccataagaaggtggaacgcgaggagaaaccctgtggtcatcaaaagttccacgaggggcgactgacaggtaaaattcggtgtaagctcattaccaagacacccctcatcgtcccagatactagtaatgacgatttcttcagacctgcggataaagaagctcggaaggaaaaggacgaatatcataaatcatatgctttcttcagacttcataaacaaatcatgattcccgggagcgaattgagaggaatggtgagtagtgtctacgaaactgtgacaaattcttgcttcaggatatttgatgagactaaacggttgtcatggcggatggatgctgatcaccagaatgtgctgcaagactttctcccaggtcgagtgaccgccgatgggaaacatatacaaaagttttccgaaactgcaagggtgcctttctatgacaaaacgcagaaacattttgacattcttgatgagcaagaaattgctggtgagaaacctgttcggatgtgggtcaagcgttttattaaacgagggggtgggtcaagagatagtagataccaaaaggcctttcaagagatacccgagaacgacccagacggatgggagtgtaaagagggctaccttcatgtcgtcggccccagcaaagtagagtttagtgacaagaaaggggatgtgatcaataactttcaaggaacactcccatcagttcccaacgactggaaaacaattaggacgaacgattttaagaataggaaaaggaagaatgaacctgtgttttgttgtgaggatgataagggcaattactataccatggctaaatattgcgaaaccttcttcttcgatctgaaggagaacgaggaatacgagatccccgagaaagcaagaatcaaatacaaagaactgctcagggtctataacaacaatcctcaagcagtgccggagagcgtatttcagtctagagttgcccgggaaaacgtggaaaagctgaagtccggagatcttgtgtatttcaaacataatgaaaagtacgtagaggacatcgtcccagtgcggatttcccgaactgtagacgataggatgatcggcaaacgtatgagcgccgatctgcggccgtgccatggagattgggtggaagatggtgatctcagtgccttgaatgcatatcccgagaaaagactcctcttgcgccaccccaaaggactctgccctgcttgccggctctttggaaccggatcttacaagggcagagtcaggtttggattcgcgtcactcgaaaacgatccggagtggctgatcccaggcaagaatcccggcgatccgtttcacggcgggccggtgatgctctcattgttggaacggcctcgcccgacttggagtataccgggatccgacaataagtttaaagtgcctggcagaaagttttacgtccaccaccacgcctggaaaaccattaaggacgggaaccatcccacaacaggcaaagctattgaacaaagccctaataaccgcactgtagaagctctcgccggcgggaattcctttagcttcgaaattgcctttgagaacctgaaagaatgggagctgggtttgctcatccacagcctgcaactcgaaaagggtctggcgcataaacttggaatggcaaagtctatgggatttggttcagttgaaattgacgtcgaatcagtgcgcctgagaaaagattggaagcaatggcggaatggcaattccgaaattcccaactggttgggaaaaggatttgctaaactgaaggaatggttccgggacgagctcgattttatagaaaatcttaagaaacttctttggtttcctgagggcgaccaagcaccccgggtttgctaccccatgctgcgaaagaaggacgatcctaatgggaatagcggttacgaagaactcaaagacggggaattcaagaaagaagatcggcagaagaagctgaccacgccgtggacaccgtgggca

SEQ ID NO: 537 - DNA, 4062 bp, synthetic construct
  source 1..4062: mol_type = other DNA
atgaaacggacagccgacggaagcgagttcgagtcaccaaagaagaagcggaaagtcacgactactatgaagatttcaattgaattcctcgagccgtttcggatgaccaaatggcaggaaagcactaggcgaaacaagaacaacaaggaatttgttcgcggccaagcttttgcaagatggcatagaaataagaaggataacacaaaagggcggccttacataactgggacattgctgcggtccgcagtaattagaagcgcggaaaacctgctgacattgagtgatgggaaaattagcgaaaagacatgttgtcctgggaaatttgatacggaagataaagacaggttgctgcaattgaggcagcggtccacccttcgttggaccgataagaacccctgtccagataacgctgaaacttactgcccgttttgcgaacttctcgggagatccggtaacgatggaaagaaggctgagaagaaggattggcgctttcgtattcattttggcaatctttcccttccagggaagcccgatttcgacgggccaaaagctataggcagccaacgggtacttaacagggtcgatttcaaatccggtaaggcccatgacttctttaaggcttacgaagtcgaccatactaggtttccccgcttcgaaggggagattaccatagataataaagtcagcgctgaagccaggaaactgctctgtgattctctcaagtttacggatcggctgtgtggagctctgtgcgtaatcaggttcgatgaatatacaccagcagccgatagtgggaaacaaaccgaaaatgtccaagcagaaccgaatgctaatctcgctgaaaagaccgcagagcaaattattagcattctggacgataataagaaaaccgaatatacccgcctgcttgctgatgctattcgttcactccgccgctctagtaaacttgtcgctggcttgccaaaggatcatgacgggaaggatgaccattacctctgggatatcggcaagaagaagaaagacgaaaactctgtcactattaggcaaatccttacgacctcagcagacaccaaggaactcaagaatgccggaaaatggagagaattctgcgagaagctgggtgaagcgctgtacctcaagagtaaagacatgagtggcggcctgaaaattactcggagaatactgggcgatgctgaattccatggaaagcccgatcggcttgaaaagagccggtctgtgtcaatcggatctgtgttgaaagaaactgtggtatgcggcgaactggtcgctaaaacgcccttcttcttcggagcgatagacgaagatgcaaaacaaaccgacctgcaagtactcctcactcccgataacaagtatagactgccaagaagcgccgtgcgaggtatactccgtcgagatcttcaaacctattttgatagcccatgcaatgctgagttgggtggacggccatgcatgtgtaagacgtgtaggattatgagagggatcacggtgatggatgcgcgcagtgagtacaatgccccgccagaaataaggcatcgtacccgcattaatcccttcacaggcacggttgcggaaggtgccctgtttaatatggaagtagcccccgaggggattgtctttccatttcaactccggtaccggggctctgaagatgggctgcccgatgcactgaaaacggtgttgaaatggtgggctgaggggcaggcattcatgagtggcgctgcctcaaccgggaagggccgattccggatggaaaatgctaaatatgaaacgctggatctgagcgacgagaatcaaaggaatgactatcttaagaattggggatggcgtgacgagaaggggctcgaggaactgaagaaacgactgaactcaggtctgccagagcccggtaattatagggatccaaaatggcacgagattaacgtttccattgagatggcaagcccttttattaatggcgacccaatccgcgcagccgtggacaaacgtggtacagatgtggttaccttcgttaagtataaagctgaaggggaagaggcgaaacccgtatgtgcatacaaggccgaatcttttagaggggtgatcagaagtgccgtggcacgcattcatatggaagatggcgtccctttgactgagttgactcacagtgactgtgaatgtctcctgtgccaaatctttggaagtgagtatgaagccggcaaaataaggtttgaagatctcgtattcgaaagtgacccggaacctgtgaccttcgatcatgtggccatcgatagattcactggcggtgcagctgataagaagaaattcgatgattcccctctgcccggtagccctgcaagaccgctcatgttgaaaggctccttctggatccgcagggacgttctcgaggacgaagagtactgtaaggcactcggtaaggctcttgcagatgtgaataatggcctttatcccctcggtggaaagagcgccatcggctacggacaggtcaagagtctgggtataaagggagatgataagaggatttctcgcctcatgaatcctgcctttgatgagacagatgtagccgttccagaaaagcccaaaactgatgccgaggttcgcatcgaggcagagaaagtatattacccacactatttcgtcgaaccccataagaaggtggaacgcgaggagaaaccctgtggtcatcaaaagttccacgaggggcgactgacaggtaaaattcggtgtaagctcattaccaagacacccctcatcgtcccagatactagtaatgacgatttcttcagacctgcggataaagaagctcggaaggaaaaggacgaatatcataaatcatatgctttcttcagacttcataaacaaatcatgattcccgggagcgaattgagaggaatggtgagtagtgtctacgaaactgtgacaaattcttgcttcaggatatttgatgagactaaacggttgtcatggcggatggatgctgatcaccagaatgtgctgcaagactttctcccaggtcgagtgaccgccgatgggaaacatatacaaaagttttccgggggtgggtcacgaactgtagacgataggatgatcggcaaacgtatgagcgccgatctgcggccgtgccatggagattgggtggaagatggtgatctcagtgccttgaatgcatatcccgagaaaagactcctcttgcgccaccccaaaggactctgccctgcttgccggctctttggaaccggatcttacaagggcagagtcaggtttggattcgcgtcactcgaaaacgatccggagtggctgatcccaggcaagaatcccggcgatccgtttcacggcgggccggtgatgctctcattgttggaacggcctcgcccgacttggagtataccgggatccgacaataagtttaaagtgcctggcagaaagttttacgtccaccaccacgcctggaaaaccattaaggacgggaaccatcccacaacaggcaaagctattgaacaaagccctaataaccgcactgtagaagctctcgccggcgggaattcctttagcttcgaaattgcctttgagaacctgaaagaatgggagctgggtttgctcatccacagcctgcaactcgaaaagggtctggcgcataaacttggaatggcaaagtctatgggatttggttcagttgaaattgacgtcgaatcagtgcgcctgagaaaagattggaagcaatggcggaatggcaattccgaaattcccaactggttgggaaaaggatttgctaaactgaaggaatggttccgggacgagctcgattttatagaaaatcttaagaaacttctttggtttcctgagggcgaccaagcaccccgggtttgctaccccatgctgcgaaagaaggacgatcctaatgggaatagcggttacgaagaactcaaagacggggaattcaagaaagaagatcggcagaagaagctgaccacgccgtggacaccgtgggcaaaacggacagccgacggaagcgagttcgagtcaccaaagaagaagcggaaagtc

SEQ ID NO: 538 - DNA, 3978 bp, synthetic construct
  source 1..3978: mol_type = other DNA
atgaaacggacagccgacggaagcgagttcgagtcaccaaagaagaagcggaaagtcacgactactatgaagatttcaattgaattcctcgagccgtttcggatgaccaaatggcaggaaagcactaggcgaaacaagaacaacaaggaatttgttcgcggccaagcttttgcaagatggcatagaaataagaaggataacacaaaagggcggccttacataactgggacattgctgcggtccgcagtaattagaagcgcggaaaacctgctgacattgagtgatgggaaaattagcgaaaagacatgttgtcctgggaaatttgatacggaagataaagacaggttgctgcaattgaggcagcggtccacccttcgttggaccgataagaacccctgtccagataacgctgaaacttactgcccgttttgcgaacttctcgggagatccggtaacgatggaaagaaggctgagaagaaggattggcgctttcgtattcattttggcaatctttcccttccagggaagcccgatttcgacgggccaaaagctataggcagccaacgggtacttaacagggtcgatttcaaatccggtaaggcccatgacttctttaaggcttacgaagtcgaccatactaggtttccccgcttcgaaggggagattaccatagataataaagtcagcgctgaagccaggaaactgctctgtgattctctcaagtttacggatcggctgtgtggagctctgtgcgtaatcaggttcgatgaatatacaccagcagccgatagtgggaaacaaaccgaaaatgtccaagcagaaccgaatgctaatctcgctgaaaagaccgcagagcaaattattagcattctggacgataataagaaaaccgaatatacccgcctgcttgctgatgctattcgttcactccgccgctctagtaaacttgtcgctggcttgccaaaggatcatgacgggaaggatgaccattacctctgggatatcggcaagaagaagaaagacgaaaactctgtcactattaggcaaatccttacgacctcagcagacaccaaggaactcaagaatgccggaaaatggagagaattctgcgagaagctgggtgaagcgctgtacctcaagagtaaagacatgagtggcggcctgaaaattactcggagaatactgggcgatgctgaattccatggaaagcccgatcggcttgaaaagagccggtctgtgtcaatcggatctgtgttgaaagaaactgtggtatgcggcgaactggtcgctaaaacgcccttcttcttcggagcgatagacgaagatgcaaaacaaaccgacctgcaagtactcctcactcccgataacaagtatagactgccaagaagcgccgtgcgaggtatactccgtcgagatcttcaaacctattttgatagcccatgcaatgctgagttgggtggacggccatgcatgtgtaagacgtgtaggattatgagagggatcacggtgatggatgcgcgcagtgagtacaatgccccgccagaaataaggcatcgtacccgcattaatcccttcacaggcacggttgcggaaggtgccctgtttaatatggaagtagcccccgaggggattgtctttccatttcaactccggtaccggggctctgaagatgggctgcccgatgcactgaaaacggtgttgaaatggtgggctgaggggcaggcattcatgagtggcgctgcctcaaccgggaagggccgattccggatggaaaatgctaaatatgaaacgctggatctgagcgacgagaatcaaaggaatgactatcttaagaattggggatggcgtgacgagaaggggctcgaggaactgaagaaacgactgaactcaggtctgccagagcccggtaattatagggatccaaaatggcacgagattaacgtttccattgagatggcaagcccttttattaatggcgacccaatccgcgcagccgtggacaaacgtggtacagatgtggttaccttcgttaagtataaagctgaaggggaagaggcgaaacccgtatgtgcatacaaggccgaatcttttagaggggtgatcagaagtgccgtggcacgcattcatatggaagatggcgtccctttgactgagttgactcacagtgactgtgaatgtctcctgtgccaaatctttggaagtgagtatgaagccggcaaaataaggtttgaagatctcgtattcgaaagtgacccggaacctgtgaccttcgatcatgtggccatcgatagattcactggcggtgcagctgataagaagaaattcgatgattcccctctgcccggtagccctgcaagaccgctcatgttgaaaggctccttctggatccgcagggacgttctcgaggacgaagagtactgtaaggcactcggtaaggctcttgcagatgtgaataatggcctttatcccctcggtggaaagagcgccatcggctacggacaggtcaagagtctgggtataaagggagatgataagaggatttctcgcctcatgaatcctgcctttgatgagacagatgtagccgttccagaaaagcccaaaactgatgccgaggttcgcatcgaggcagagaaagtatattacccacactatttcgtcgaaccccataagaaggtggaacgcgaggagaaaccctgtggtcatcaaaagttccacgaggggcgactgacaggtaaaattcggtgtaagctcattaccaagacacccctcatcgtcccagatactagtaatgacgatttcttcagacctgcggataaagaagctcggaaggaaaaggacgaatatcataaatcatatgctttcttcagacttcataaacaaatcatgattcccgggagcgaattgagaggaatggtgagtagtgtctacgaaactgtgacaaattcttgcttcaggatatttgatgagactaaacggttgtcatggcgggggggtgggtcacgaactgtagacgataggatgatcggcaaacgtatgagcgccgatctgcggccgtgccatggagattgggtggaagatggtgatctcagtgccttgaatgcatatcccgagaaaagactcctcttgcgccaccccaaaggactctgccctgcttgccggctctttggaaccggatcttacaagggcagagtcaggtttggattcgcgtcactcgaaaacgatccggagtggctgatcccaggcaagaatcccggcgatccgtttcacggcgggccggtgatgctctcattgttggaacggcctcgcccgacttggagtataccgggatccgacaataagtttaaagtgcctggcagaaagttttacgtccaccaccacgcctggaaaaccattaaggacgggaaccatcccacaacaggcaaagctattgaacaaagccctaataaccgcactgtagaagctctcgccggcgggaattcctttagcttcgaaattgcctttgagaacctgaaagaatgggagctgggtttgctcatccacagcctgcaactcgaaaagggtctggcgcataaacttggaatggcaaagtctatgggatttggttcagttgaaattgacgtcgaatcagtgcgcctgagaaaagattggaagcaatggcggaatggcaattccgaaattcccaactggttgggaaaaggatttgctaaactgaaggaatggttccgggacgagctcgattttatagaaaatcttaagaaacttctttggtttcctgagggcgaccaagcaccccgggtttgctaccccatgctgcgaaagaaggacgatcctaatgggaatagcggttacgaagaactcaaagacggggaattcaagaaagaagatcggcagaagaagctgaccacgccgtggacaccgtgggcaaaacggacagccgacggaagcgagttcgagtcaccaaagaagaagcggaaagtc

SEQ ID NO: 539 - DNA, 4911 bp, synthetic construct
  source 1..4911: mol_type = other DNA
atgaaacggacagccgacggaagcgagttcgagtcaccaaagaagaagcggaaagtcacgactactatgaagatttcaattgaattcctcgagccgtttcggatgaccaaatggcaggaaagcactaggcgaaacaagaacaacaaggaatttgttcgcggccaagcttttgcaagatggcatagaaataagaaggataacacaaaagggcggccttacataactgggacattgctgcggtccgcagtaattagaagcgcggaaaacctgctgacattgagtgatgggaaaattagcgaaaagacatgttgtcctgggaaatttgatacggaagataaagacaggttgctgcaattgaggcagcggtccacccttcgttggaccgataagaacccctgtccagataacgctgaaacttactgcccgttttgcgaacttctcgggagatccggtaacgatggaaagaaggctgagaagaaggattggcgctttcgtattcattttggcaatctttcccttccagggaagcccgatttcgacgggccaaaagctataggcagccaacgggtacttaacagggtcgatttcaaatccggtaaggcccatgacttctttaaggcttacgaagtcgaccatactaggtttccccgcttcgaaggggagattaccatagataataaagtcagcgctgaagccaggaaactgctctgtgattctctcaagtttacggatcggctgtgtggagctctgtgcgtaatcaggttcgatgaatatacaccagcagccgatagtgggaaacaaaccgaaaatgtccaagcagaaccgaatgctaatctcgctgaaaagaccgcagagcaaattattagcattctggacgataataagaaaaccgaatatacccgcctgcttgctgatgctattcgttcactccgccgctctagtaaacttgtcgctggcttgccaaaggatcatgacgggaaggatgaccattacctctgggatatcggcaagaagaagaaagacgaaaactctgtcactattaggcaaatccttacgacctcagcagacaccaaggaactcaagaatgccggaaaatggagagaattctgcgagaagctgggtgaagcgctgtacctcaagagtaaagacatgagtggcggcctgaaaattactcggagaatactgggcgatgctgaattccatggaaagcccgatcggcttgaaaagagccggtctgtgtcaatcggatctgtgttgaaagaaactgtggtatgcggcgaactggtcgctaaaacgcccttcttcttcggagcgatagacgaagatgcaaaacaaaccgacctgcaagtactcctcactcccgataacaagtatagactgccaagaagcgccgtgcgaggtatactccgtcgagatcttcaaacctattttgatagcccatgcaatgctgagttgggtggacggccatgcatgtgtaagacgtgtaggattatgagagggatcacggtgatggatgcgcgcagtgagtacaatgccccgccagaaataaggcatcgtacccgcattaatcccttcacaggcacggttgcggaaggtgccctgtttaatatggaagtagcccccgaggggattgtctttccatttcaactccggtaccggggctctgaagatgggctgcccgatgcactgaaaacggtgttgaaatggtgggctgaggggcaggcattcatgagtggcgctgcctcaaccgggaagggccgattccggatggaaaatgctaaatatgaaacgctggatctgagcgacgagaatcaaaggaatgactatcttaagaattggggatggcgtgacgagaaggggctcgaggaactgaagaaacgactgaactcaggtctgccagagcccggtaattatagggatccaaaatggcacgagattaacgtttccattgagatggcaagcccttttattaatggcgacccaatccgcgcagccgtggacaaacgtggtacagatgtggttaccttcgttaagtataaagctgaaggggaagaggcgaaacccgtatgtgcatacaaggccgaatcttttagaggggtgatcagaagtgccgtggcacgcattcatatggaagatggcgtccctttgactgagttgactcacagtgactgtgaatgtctcctgtgccaaatctttggaagtgagtatgaagccggcaaaataaggtttgaagatctcgtattcgaaagtgacccggaacctgtgaccttcgatcatgtggccatcgatagattcactggcggtgcagctgataagaagaaattcgatgattcccctctgcccggtagccctgcaagaccgctcatgttgaaaggctccttctggatccgcagggacgttctcgaggacgaagagtactgtaaggcactcggtaaggctcttgcagatgtgaataatggcctttatcccctcggtggaaagagcgccatcggctacggacaggtcaagagtctgggtataaagggagatgataagaggatttctcgcctcatgaatcctgcctttgatgagacagatgtagccgttccagaaaagcccaaaactgatgccgaggttcgcatcgaggcagagaaagtatattacccacactatttcgtcgaaccccataagaaggtggaacgcgaggagaaaccctgtggtcatcaaaagttccacgaggggcgactgacaggtaaaattcggtgtaagctcattaccaagacacccctcatcgtcccagatactagtaatgacgatttcttcagacctgcggataaagaagctcggaaggaaaaggacgaatatcataaatcatatgctttcttcagacttcataaacaaatcatgattcccgggagcgaattgagaggaatggtgagtagtgtctacgaaactgtgacaaattcttgcttcaggatatttgatgagactaaacggttgtcatggcggatggatgctgatcaccagaatgtgctgcaagactttctcccaggtcgagtgaccgccgatgggaaacatatacaaaagttttccgaaactgcaagggtgcctttctatgacaaaacgcagaaacattttgacattcttgatgagcaagaaattgctggtgagaaacctgttcggatgtgggtcaagcgttttattaaacgactgagcctcgttgatcctgctaaacacccccagaagaaacaagacaataaatggaaaagacgcaaagaaggcatcgccacatttatagagcaaaagaatggctcttattattttaacgtggtcaccaataatggctgcacttctttccacttgtggcataaacctgacaattttgaccaggagaaactcgaaggcatacagaatggtgagaaactggattgctgggtaagagatagtagataccaaaaggcctttcaagagatacccgagaacgacccagacggatgggagtgtaaagagggctaccttcatgtcgtcggccccagcaaagtagagtttagtgacaagaaaggggatgtgatcaataactttcaaggaacactcccatcagttcccaacgactggaaaacaattaggacgaacgattttaagaataggaaaaggaagaatgaacctgtgttttgttgtgaggatgataagggcaattactataccatggctaaatattgcgaaaccttcttcttcgatctgaaggagaacgaggaatacgagatccccgagaaagcaagaatcaaatacaaagaactgctcagggtctataacaacaatcctcaagcagtgccggagagcgtatttcagtctagagttgcccgggaaaacgtggaaaagctgaagtccggagatcttgtgtatttcaaacataatgaaaagtacgtagaggacatcgtcccagtgcggatttcccgaactgtagacgataggatgatcggcaaacgtatgagcgccgatctgcggccgtgccatggagattgggtggaagatggtgatctcagtgccttgaatgcatatcccgagaaaagactcctcttgcgccaccccaaaggactctgccctgcttgccggctctttggaaccggatcttacaagggcagagtcaggtttggattcgcgtcactcgaaaacgatccggagtggctgatcccaggcaagaatcccggcgatccgtttcacggcgggccggtgatgctctcattgttggaacggcctcgcccgacttggagtataccgggatccgacaataagtttaaagtgcctggcagaaagttttacgtccaccaccacgcctggaaaaccattaaggacgggaaccatcccacaacaggcaaagctattgaacaaagccctaataaccgcactgtagaagctctcgccggcgggaattcctttagcttcgaaattgcctttgagaacctgaaagaatgggagctgggtttgctcatccacagcctgcaactcgaaaagggtctggcgcataaacttggaatggcaaagtctatgggatttggttcagttgaaattgacgtcgaatcagtgcgcctgagaaaagattggaagcaatggcggaatggcaattccgaaattcccaactggttgggaaaaggatttgctaaactgaaggaatggttccgggacgagctcgattttatagaaaatcttaagaaacttctttggtttcctgagggcgaccaagcaccccgggtttgctaccccatgctgcgaaagaaggacgatcctaatgggaatagcggttacgaagaactcaaagacggggaattcaagaaagaagatcggcagaagaagctgaccacgccgtggacaccgtgggcaaaacggacagccgacggaagcgagttcgagtcaccaaagaagaagcggaaagtc

SEQ ID NO: 540 - DNA, 4911 bp, synthetic construct
  source 1..4911: mol_type = other DNA
atgaaacggacagccgacggaagcgagttcgagtcaccaaagaagaagcggaaagtcacgactactatgaagatttcaattgaattcctcgagccgtttcggatgaccaaatggcaggaaagcactaggcgaaacaagaacaacaaggaatttgttcgcggccaagcttttgcaagatggcatagaaataagaaggataacacaaaagggcggccttacataactgggacattgctgcggtccgcagtaattagaagcgcggaaaacctgctgacattgagtgatgggaaaattagcgaaaagacatgttgtcctgggaaatttgatacggaagataaagacaggttgctgcaattgaggcagcggtccacccttcgttggaccgataagaacccctgtccagataacgctgaaacttactgcccgttttgcgaacttctcgggagatccggtaacgatggaaagaaggctgagaagaaggattggcgctttcgtattcattttggcaatctttcccttccagggaagcccgatttcgacgggccaaaagctataggcagccaacgggtacttaacagggtcgatttcaaatccggtaaggcccatgacttctttaaggcttacgaagtcgaccatactaggtttccccgcttcgaaggggagattaccatagataataaagtcagcgctgaagccaggaaactgctctgtgattctctcaagtttacggatcggctgtgtggagctctgtgcgtaatcaggttcgatgaatatacaccagcagccgatagtgggaaacaaaccgaaaatgtccaagcagaaccgaatgctaatctcgctgaaaagaccgcagagcaaattattagcattctggacgataataagaaaaccgaatatacccgcctgcttgctgatgctattcgttcactccgccgctctagtaaacttgtcgctggcttgccaaaggatcatgacgggaaggatgaccattacctctgggatatcggcaagaagaagaaagacgaaaactctgtcactattaggcaaatccttacgacctcagcagacaccaaggaactcaagaatgccggaaaatggagagaattctgcgagaagctgggtgaagcgctgtacctcaagagtaaagacatgagtggcggcctgaaaattactcggagaatactgggcgatgctgaattccatggaaagcccgatcggcttgaaaagagccggtctgtgtcaatcggatctgtgttgaaagaaactgtggtatgcggcgaactggtcgctaaaacgcccttcttcttcggagcgatagacgaagatgcaaaacaaaccgcactgcaagtactcctcactcccgataacaagtatagactgccaagaagcgccgtgcgaggtatactccgtcgagatcttcaaacctattttgatagcccatgcaatgctgagttgggtggacggccatgcatgtgtaagacgtgtaggattatgagagggatcacggtgatggatgcgcgcagtgagtacaatgccccgccagaaataaggcatcgtacccgcattaatcccttcacaggcacggttgcggaaggtgccctgtttaatatggaagtagcccccgaggggattgtctttccatttcaactccggtaccggggctctgaagatgggctgcccgatgcactgaaaacggtgttgaaatggtgggctgaggggcaggcattcatgagtggcgctgcctcaaccgggaagggccgattccggatggaaaatgctaaatatgaaacgctggatctgagcgacgagaatcaaaggaatgactatcttaagaattggggatggcgtgacgagaaggggctcgaggaactgaagaaacgactgaactcaggtctgccagagcccggtaattatagggatccaaaatggcacgagattaacgtttccattgagatggcaagcccttttattaatggcgacccaatccgcgcagccgtggacaaacgtggtacagcggtggttaccttcgttaagtataaagctgaaggggaagaggcgaaacccgtatgtgcatacaaggccgaatcttttagaggggtgatcagaagtgccgtggcacgcattcatatggaagatggcgtccctttgactgagttgactcacagtgactgtgaatgtctcctgtgccaaatctttggaagtgagtatgaagccggcaaaataaggtttgaagatctcgtattcgaaagtgacccggaacctgtgaccttcgatcatgtggccatcgatagattcactggcggtgcagctgataagaagaaattcgatgattcccctctgcccggtagccctgcaagaccgctcatgttgaaaggctccttctggatccgcagggacgttctcgaggacgaagagtactgtaaggcactcggtaaggctcttgcagatgtgaataatggcctttatcccctcggtggaaagagcgccatcggctacggacaggtcaagagtctgggtataaagggagatgataagaggatttctcgcctcatgaatcctgcctttgatgagacagatgtagccgttccagaaaagcccaaaactgatgccgaggttcgcatcgaggcagagaaagtatattacccacactatttcgtcgaaccccataagaaggtggaacgcgaggagaaaccctgtggtcatcaaaagttccacgaggggcgactgacaggtaaaattcggtgtaagctcattaccaagacacccctcatcgtcccagatactagtaatgacgatttcttcagacctgcggataaagaagctcggaaggaaaaggacgaatatcataaatcatatgctttcttcagacttcataaacaaatcatgattcccgggagcgaattgagaggaatggtgagtagtgtctacgaaactgtgacaaattcttgcttcaggatatttgatgagactaaacggttgtcatggcggatggatgctgatcaccagaatgtgctgcaagactttctcccaggtcgagtgaccgccgatgggaaacatatacaaaagttttccgaaactgcaagggtgcctttctatgacaaaacgcagaaacattttgacattcttgatgagcaagaaattgctggtgagaaacctgttcggatgtgggtcaagcgttttattaaacgactgagcctcgttgatcctgctaaacacccccagaagaaacaagacaataaatggaaaagacgcaaagaaggcatcgccacatttatagagcaaaagaatggctcttattattttaacgtggtcaccaataatggctgcacttctttccacttgtggcataaacctgacaattttgaccaggagaaactcgaaggcatacagaatggtgagaaactggattgctgggtaagagatagtagataccaaaaggcctttcaagagatacccgagaacgacccagacggatgggagtgtaaagagggctaccttcatgtcgtcggccccagcaaagtagagtttagtgacaagaaaggggatgtgatcaataactttcaaggaacactcccatcagttcccaacgactggaaaacaattaggacgaacgattttaagaataggaaaaggaagaatgaacctgtgttttgttgtgaggatgataagggcaattactataccatggctaaatattgcgaaaccttcttcttcgatctgaaggagaacgaggaatacgagatccccgagaaagcaagaatcaaatacaaagaactgctcagggtctataacaacaatcctcaagcagtgccggagagcgtatttcagtctagagttgcccgggaaaacgtggaaaagctgaagtccggagatcttgtgtatttcaaacataatgaaaagtacgtagaggacatcgtcccagtgcggatttcccgaactgtagacgataggatgatcggcaaacgtatgagcgccgatctgcggccgtgccatggagattgggtggaagatggtgatctcagtgccttgaatgcatatcccgagaaaagactcctcttgcgccaccccaaaggactctgccctgcttgccggctctttggaaccggatcttacaagggcagagtcaggtttggattcgcgtcactcgaaaacgatccggagtggctgatcccaggcaagaatcccggcgatccgtttcacggcgggccggtgatgctctcattgttggaacggcctcgcccgacttggagtataccgggatccgacaataagtttaaagtgcctggcagaaagttttacgtccaccaccacgcctggaaaaccattaaggacgggaaccatcccacaacaggcaaagctattgaacaaagccctaataaccgcactgtagaagctctcgccggcgggaattcctttagcttcgaaattgcctttgagaacctgaaagaatgggagctgggtttgctcatccacagcctgcaactcgaaaagggtctggcgcataaacttggaatggcaaagtctatgggatttggttcagttgaaattgacgtcgaatcagtgcgcctgagaaaagattggaagcaatggcggaatggcaattccgaaattcccaactggttgggaaaaggatttgctaaactgaaggaatggttccgggacgagctcgattttatagaaaatcttaagaaacttctttggtttcctgagggcgaccaagcaccccgggtttgctaccccatgctgcgaaagaaggacgatcctaatgggaatagcggttacgaagaactcaaagacggggaattcaagaaagaagatcggcagaagaagctgaccacgccgtggacaccgtgggcaaaacggacagccgacggaagcgagttcgagtcaccaaagaagaagcggaaagtc

SEQ ID NO: 541 - DNA, 4374 bp, synthetic construct
  source 1..4374: mol_type = other DNA
atgaaagtgaccaaggtcgacggcatcagccacaagaagtacatcgaagagggcaagctcgtgaagtccaccagcgaggaaaaccggaccagcgagagactgagcgagctgctgagcatccggctggacatctacatcaagaaccccgacaacgcctccgaggaagagaaccggatcagaagagagaacctgaagaagttctttagcaacaaggtgctgcacctgaaggacagcgtgctgtatctgaagaaccggaaagaaaagaacgccgtgcaggacaagaactatagcgaagaggacatcagcgagtacgacctgaaaaacaagaacagcttctccgtgctgaagaagatcctgctgaacgaggacgtgaactctgaggaactggaaatctttcggaaggacgtggaagccaagctgaacaagatcaacagcctgaagtacagcttcgaagagaacaaggccaactaccagaagatcaacgagaacaacgtggaaaaagtgggcggcaagagcaagcggaacatcatctacgactactacagagagagcgccaagcgcaacgactacatcaacaacgtgcaggaagccttcgacaagctgtataagaaagaggatatcgagaaactgtttttcctgatcgagaacagcaagaagcacgagaagtacaagatccgcgagtactatcacaagatcatcggccggaagaacgacaaagagaacttcgccaagattatctacgaagagatccagaacgtgaacaacatcaaagagctgattgagaagatccccgacatgtctgagctgaagaaaagccaggtgttctacaagtactacctggacaaagaggaactgaacgacaagaatattaagtacgccttctgccacttcgtggaaatcgagatgtcccagctgctgaaaaactacgtgtacaagcggctgagcaacatcagcaacgataagatcaagcggatcttcgagtaccagaatctgaaaaagctgatcgaaaacaaactgctgaacaagctggacacctacgtgcggaactgcggcaagtacaactactatctgcaagtgggcgagatcgccacctccgactttatcgcccggaaccggcagaacgaggccttcctgagaaacatcatcggcgtgtccagcgtggcctacttcagcctgaggaacatcctggaaaccgagaacgagaacggtatcaccggccggatgcggggcaagaccgtgaagaacaacaagggcgaagagaaatacgtgtccggcgaggtggacaagatctacaatgagaacaagcagaacgaagtgaaagaaaatctgaagatgttctacagctacgacttcaacatggacaacaagaacgagatcgaggacttcttcgccaacatcgacgaggccatcagcagcatcagacacggcatcgtgcacttcaacctggaactggaaggcaaggacatcttcgccttcaagaatatcgcccccagcgagatctccaagaagatgtttcagaacgaaatcaacgaaaagaagctgaagctgaaaatcttcaagcagctgaacagcgccaacgtgttcaactactacgagaaggatgtgatcatcaagtacctgaagaataccaagttcaacttcgtgaacaaaaacatccccttcgtgcccagcttcaccaagctgtacaacaagattgaggacctgcggaataccctgaagtttttttggagcgtgcccaaggacaaagaagagaaggacgcccagatctacctgctgaagaatatctactacggcgagttcctgaacaagttcgtgaaaaactccaaggtgttctttaagatcaccaatgaagtgatcaagattaacaagcagcggaaccagaaaaccggccactacaagtatcagaagttcgagaacatcgagaaaaccgtgcccgtggaatacctggccatcatccagagcagagagatgatcaacaaccaggacaaagaggaaaagaatacctacatcgactttattcagcagattttcctgaagggcttcatcgactacctgaacaagaacaatctgaagtatatcgagagcaacaacaacaatgacaacaacgacatcttctccaagatcaagatcaaaaaggataacaaagagaagtacgacaagatcctgaagaactatgagaagcacaatcggaacaaagaaatccctcacgagatcaatgagttcgtgcgcgagatcaagctggggaagattctgaagtacaccgagaatctgaacatgttttacctgatcctgaagctgctgaaccacaaagagctgaccaacctgaagggcagcctggaaaagtaccagtccgccaacaaagaagaaaccttcagcgacgagttggaactgatcaacctgctgaacctggacaacaacagagtgaccgaggacttcgagctggaagccaacgagatcggcaagttcctggacttcaacgaaaacaaaatcaaggaccggaaagagctgaaaaagttcgacaccaacaagatctatttcgacggcgagaacatcatcaagcaccgggccttctacaatatcaagaaatacggcatgctgaatctgctggaaaagatcgccgataaggccaagtataagatcagcctgaaagaactgaaagagtacagcaacaagaagaatgagattgaaaagaactacaccatgcagcagaacctgcaccggaagtacgccagacccaagaaggacgaaaagttcaacgacgaggactacaaagagtatgagaaggccatcggcaacatccagaagtacacccacctgaagaacaaggtggaattcaatgagctgaacctgctgcagggcctgctgctgaagatcctgcaccggctcgtgggctacaccagcatctgggagcgggacctgagattccggctgaagggcgagtttcccgagaaccactacatcgaggaaattttcaatttcgacaactccaagaatgtgaagtacaaaagcggccagatcgtggaaaagtatatcaacttctacaaagaactgtacaaggacaatgtggaaaagcggagcatctactccgacaagaaagtgaagaaactgaagcaggaaaaaaaggacctgtacatccggaactacattgcccacttcaactacatcccccacgccgagattagcctgctggaagtgctggaaaacctgcggaagctgctgtcctacgaccggaagctgaagaacgccatcatgaagtccatcgtggacattctgaaagaatacggcttcgtggccaccttcaagatcggcgctgacaagaagatcgaaatccagaccctggaatcagagaagatcgtgcacctgaagaatctgaagaaaaagaaactgatgaccgaccggaacagcgaggaactgtgcgaactcgtgaaagtcatgttcgagtacaaggccctggaaggaggaggtggaagcggaggaggaggaagcggaggaggaggtagcgtgagtaaaggtgaagaactcttcactggagtagtgcccattctggtagagcttgatggagatgtaaatggacataaattctccgtcaggggcgaaggcgaaggggacgccacgaatggtaagctgactctgaaattcatctgtacgacgggcaaactgcccgtcccatggcctacactcgtaacgaccctcacctacggcgtgcaatgcttttctcgatatcccgaccacatgaaacagcatgactttttcaagtctgcaatgcctgaaggttatgttcaagaaaggaccatcagctttaaggatgatggtacatataaaacccgagccgaggttaaatttgaaggggacactctggttaatcgaattgaactgaaaggtattgattttaaggaggacggtaacatactggggcacaagttggagtacaactttaacagccataatgtgtatattaccgctgataagcagaaaaatgggataaaggccaactttaagatccgacataatgtcgaagatggtagtgttcaactggctgatcattaccaacaaaatacgcccatcggagatggacctgtactcttgcctgacaatcattatctctccacgcaatcaaagctttccaaggacccaaacgaaaagagagatcacatggtccttctggaatttgtgactgccgcaggcatcactctcggtatggatgagctgtacaagggatccgagggagctcccaagaaaaagcgcaaggtaggtagttcctacccatacgatgttccagattacgcttatccctacgacgtgcctgattatgcatacccatatgatgtccccgactatgccaaacggacagccgacggaagcgagttcgagtca

SEQ ID NO: 542 - DNA, 3399 bp, synthetic construct
  source 1..3399: mol_type = other DNA
atgaacatccccgctctggtggaaaaccagaagaagtactttggcacctacagcgtgatggccatgctgaacgctcagaccgtgctggaccacatccagaaggtggccgatattgagggcgagcagaacgagaacaacgagaatctgtggtttcaccccgtgatgagccacctgtacaacgccaagaacggctacgacaagcagcccgagaaaaccatgttcatcatcgagcggctgcagagctacttcccattcctgaagatcatggccgagaaccagagagagtacagcaacggcaagtacaagcagaaccgcgtggaagtgaacagcaacgacatcttcgaggtgctgaagcgcgccttcggcgtgctgaagatgtacagggacctgaccaaccactacaagacctacgaggaaaagctgaacgacggctgcgagttcctgaccagcacagagcaacctctgagcggcatgatcaacaactactacacagtggccctgcggaacatgaacgagagatacggctacaagacagaggacctggccttcatccaggacaagcggttcaagttcgtgaaggacgcctacggcaagaaaaagtcccaagtgaataccggattcttcctgagcctgcaggactacaacggcgacacacagaagaagctgcacctgagcggagtgggaatcgccctgctgatctgcctgttcctggacaagcagtacatcaacatctttctgagcaggctgcccatcttctccagctacaatgcccagagcgaggaacggcggatcatcatcagatccttcggcatcaacagcatcaagctgcccaaggaccggatccacagcgagaagtccaacaagagcgtggccatggatatgctcaacgaagtgaagcggtgccccgacgagctgttcacaacactgtctgccgagaagcagtcccggttcagaatcatcagcgacgaccacaatgaagtgctgatgaagcggagcagcgacagattcgtgcctctgctgctgcagtatatcgattacggcaagctgttcgaccacatcaggttccacgtgaacatgggcaagctgagatacctgctgaaggccgacaagacctgcatcgacggccagaccagagtcagagtgatcgagcagcccctgaacggcttcggcagactggaagaggccgagacaatgcggaagcaagagaacggcaccttcggcaacagcggcatccggatcagagacttcgagaacatgaagcgggacgacgccaatcctgccaactatccctacatcgtggacacctacacacactacatcctggaaaacaacaaggtcgagatgtttatcaacgacaaagaggacagcgccccactgctgcccgtgatcgaggatgatagatacgtggtcaagacaatccccagctgccggatgagcaccctggaaattccagccatggccttccacatgtttctgttcggcagcaagaaaaccgagaagctgatcgtggacgtgcacaaccggtacaagagactgttccaggccatgcagaaagaagaagtgaccgccgagaatatcgccagcttcggaatcgccgagagcgacctgcctcagaagatcctggatctgatcagcggcaatgcccacggcaaggatgtggacgccttcatcagactgaccgtggacgacatgctgaccgacaccgagcggagaatcaagagattcaaggacgaccggaagtccattcggagcgccgacaacaagatgggaaagagaggcttcaagcagatctccacaggcaagctggccgacttcctggccaaggacatcgtgctgtttcagcccagcgtgaacgatggcgagaacaagatcaccggcctgaactaccggatcatgcagagcgccattgccgtgtacgatagcggcgacgattacgaggccaagcagcagttcaagctgatgttcgagaaggcccggctgatcggcaagggcacaacagagcctcatccatttctgtacaaggtgttcgcccgcagcatccccgccaatgccgtcgagttctacgagcgctacctgatcgagcggaagttctacctgaccggcctgtccaacgagatcaagaaaggcaacagagtggatgtgcccttcatccggcgggaccagaacaagtggaaaacacccgccatgaagaccctgggcagaatctacagcgaggatctgcccgtggaactgcccagacagatgttcgacaatgagatcaagtcccacctgaagtccctgccacagatggaaggcatcgacttcaacaatgccaacgtgacctatctgatcgccgagtacatgaagagagtgctggacgacgacttccagaccttctaccagtggaaccgcaactaccggtacatggacatgcttaagggcgagtacgacagaaagggctccctgcagcactgcttcaccagcgtggaagagagagaaggcctctggaaagagcgggcctccagaacagagcggtacagaaagcaggccagcaacaagatccgcagcaaccggcagatgagaaacgccagcagcgaagagatcgagacaatcctggataagcggctgagcaacagccggaacgagtaccagaaaagcgagaaagtgatccggcgctacagagtgcaggatgccctgctgtttctgctggccaaaaagaccctgaccgaactggccgatttcgacggcgagaggttcaaactgaaagaaatcatgcccgacgccgagaagggaatcctgagcgagatcatgcccatgagcttcaccttcgagaaaggcggcaagaagtacaccatcaccagcgagggcatgaagctgaagaactacggcgacttctttgtgctggctagcgacaagaggatcggcaacctgctggaactcgtgggcagcgacatcgtgtccaaagaggatatcatggaagagttcaacaaatacgaccagtgcaggcccgagatcagctccatcgtgttcaacctggaaaagtgggccttcgacacataccccgagctgtctgccagagtggaccgggaagagaaggtggacttcaagagcatcctgaaaatcctgctgaacaacaagaacatcaacaaagagcagagcgacatcctgcggaagatccggaacgccttcgatcacaacaattaccccgacaaaggcgtggtggaaatcaaggccctgcctgagatcgccatgagcatcaagaaggcctttggggagtacgccatcatgaagggatcccttcaactgcctccacttgaaagactgacactgggtagttcctacccatacgatgttccagattacgcttatccctacgacgtgcctgattatgcatacccatatgatgtccccgactatgcc

SEQ ID NO: 543 - DNA, 3048 bp, synthetic construct
  source 1..3048: mol_type = other DNA
atgagccccaagaagaagagaaaggtggaggccagcatcgaaaaaaaaaagtccttcgccaagggcatgggcgtgaagtccacactcgtgtccggctccaaagtgtacatgacaaccttcgccgaaggcagcgacgccaggctggaaaagatcgtggagggcgacagcatcaggagcgtgaatgagggcgaggccttcagcgctgaaatggccgataaaaacgccggctataagatcggcaacgccaaattcagccatcctaagggctacgccgtggtggctaacaaccctctgtatacaggacccgtccagcaggatatgctcggcctgaaggaaactctggaaaagaggtacttcggcgagagcgctgatggcaatgacaatatttgtatccaggtgatccataacatcctggacattgaaaaaatcctcgccgaatacattaccaacgccgcctacgccgtcaacaatatctccggcctggataaggacattattggattcggcaagttctccacagtgtatacctacgacgaattcaaagaccccgagcaccatagggccgctttcaacaataacgataagctcatcaacgccatcaaggcccagtatgacgagttcgacaacttcctcgataaccccagactcggctatttcggccaggcctttttcagcaaggagggcagaaattacatcatcaattacggcaacgaatgctatgacattctggccctcctgagcggactgaggcactgggtggtccataacaacgaagaagagtccaggatctccaggacctggctctacaacctcgataagaacctcgacaacgaatacatctccaccctcaactacctctacgacaggatcaccaatgagctgaccaactccttctccaagaactccgccgccaacgtgaactatattgccgaaactctgggaatcaaccctgccgaattcgccgaacaatatttcagattcagcattatgaaagagcagaaaaacctcggattcaatatcaccaagctcagggaagtgatgctggacaggaaggatatgtccgagatcaggaaaaatcataaggtgttcgactccatcaggaccaaggtctacaccatgatggactttgtgatttataggtattacatcgaagaggatgccaaggtggctgccgccaataagtccctccccgataatgagaagtccctgagcgagaaggatatctttgtgattaacctgaggggctccttcaacgacgaccagaaggatgccctctactacgatgaagctaatagaatttggagaaagctcgaaaatatcatgcacaacatcaaggaatttaggggaaacaagacaagagagtataagaagaaggacgcccctagactgcccagaatcctgcccgctggccgtgatgtttccgccttcagcaaactcatgtatgccctgaccatgttcctggatggcaaggagatcaacgacctcctgaccaccctgattaataaattcgataacatccagagcttcctgaaggtgatgcctctcatcggagtcaacgctaagttcgtggaggaatacgcctttttcaaagactccgccaagatcgccgatgagctgaggctgatcaagtccttcgctagaatgggagaacctattgccgatgccaggagggccatgtatatcgacgccatccgtattttaggaaccaacctgtcctatgatgagctcaaggccctcgccgacaccttttccctggacgagaacggaaacaagctcaagaaaggcaagcacggcatgagaaatttcattattaataacgtgatcagcaataaaaggttccactacctgatcagatacggtgatcctgcccacctccatgagatcgccaaaaacgaggccgtggtgaagttcgtgctcggcaggatcgctgacatccagaaaaaacagggccagaacggcaagaaccagatcgacaggtactacgaaacttgtatcggaaaggataagggcaagagcgtgagcgaaaaggtggacgctctcacaaagatcatcaccggaatgaactacgaccaattcgacaagaaaaggagcgtcattgaggacaccggcagggaaaacgccgagagggagaagtttaaaaagatcatcagcctgtacctcaccgtgatctaccacatcctcaagaatattgtcaatatcaacgccaggtacgtcatcggattccattgcgtcgagcgtgatgctcaactgtacaaggagaaaggctacgacatcaatctcaagaaactggaagagaagggattcagctccgtcaccaagctctgcgctggcattgatgaaactgcccccgataagagaaaggacgtggaaaaggagatggctgaaagagccaaggagagcattgacagcctcgagagcgccaaccccaagctgtatgccaattacatcaaatacagcgacgagaagaaagccgaggagttcaccaggcagattaacagggagaaggccaaaaccgccctgaacgcctacctgaggaacaccaagtggaatgtgatcatcagggaggacctcctgagaattgacaacaagacatgtaccctgttcagaaacaaggccgtccacctggaagtggccaggtatgtccacgcctatatcaacgacattgccgaggtcaattcctacttccaactgtaccattacatcatgcagagaattatcatgaatgagaggtacgagaaaagcagcggaaaggtgtccgagtacttcgacgctgtgaatgacgagaagaagtacaacgataggctcctgaaactgctgtgtgtgcctttcggctactgtatccccaggtttaagaacctgagcatcgaggccctgttcgataggaacgaggccgccaagttcgacaaggagaaaaagaaggtgtccggcaattccggatccggacctaagaaaaagaggaaggtggcggccgcttacccatacgatgttccagattacgctgctagcggcagtggaaaacggacagccgacggaagcgagttcgagtca

SEQ ID NO: 544 - DNA, 4449 bp, synthetic construct
  source 1..4449: mol_type = other DNA
atgaaacggacagccgacggaagcgagttcgagtcaccaaagaagaagcggaaagtcaaagtgaccaaggtcgacggcatcagccacaagaagtacatcgaagagggcaagctcgtgaagtccaccagcgaggaaaaccggaccagcgagagactgagcgagctgctgagcatccggctggacatctacatcaagaaccccgacaacgcctccgaggaagagaaccggatcagaagagagaacctgaagaagttctttagcaacaaggtgctgcacctgaaggacagcgtgctgtatctgaagaaccggaaagaaaagaacgccgtgcaggacaagaactatagcgaagaggacatcagcgagtacgacctgaaaaacaagaacagcttctccgtgctgaagaagatcctgctgaacgaggacgtgaactctgaggaactggaaatctttcggaaggacgtggaagccaagctgaacaagatcaacagcctgaagtacagcttcgaagagaacaaggccaactaccagaagatcaacgagaacaacgtggaaaaagtgggcggcaagagcaagcggaacatcatctacgactactacagagagagcgccaagcgcaacgactacatcaacaacgtgcaggaagccttcgacaagctgtataagaaagaggatatcgagaaactgtttttcctgatcgagaacagcaagaagcacgagaagtacaagatccgcgagtactatcacaagatcatcggccggaagaacgacaaagagaacttcgccaagattatctacgaagagatccagaacgtgaacaacatcaaagagctgattgagaagatccccgacatgtctgagctgaagaaaagccaggtgttctacaagtactacctggacaaagaggaactgaacgacaagaatattaagtacgccttctgccacttcgtggaaatcgagatgtcccagctgctgaaaaactacgtgtacaagcggctgagcaacatcagcaacgataagatcaagcggatcttcgagtaccagaatctgaaaaagctgatcgaaaacaaactgctgaacaagctggacacctacgtgcggaactgcggcaagtacaactactatctgcaagtgggcgagatcgccacctccgactttatcgcccggaaccggcagaacgaggccttcctgagaaacatcatcggcgtgtccagcgtggcctacttcagcctgaggaacatcctggaaaccgagaacgagaacggtatcaccggccggatgcggggcaagaccgtgaagaacaacaagggcgaagagaaatacgtgtccggcgaggtggacaagatctacaatgagaacaagcagaacgaagtgaaagaaaatctgaagatgttctacagctacgacttcaacatggacaacaagaacgagatcgaggacttcttcgccaacatcgacgaggccatcagcagcatcagacacggcatcgtgcacttcaacctggaactggaaggcaaggacatcttcgccttcaagaatatcgcccccagcgagatctccaagaagatgtttcagaacgaaatcaacgaaaagaagctgaagctgaaaatcttcaagcagctgaacagcgccaacgtgttcaactactacgagaaggatgtgatcatcaagtacctgaagaataccaagttcaacttcgtgaacaaaaacatccccttcgtgcccagcttcaccaagctgtacaacaagattgaggacctgcggaataccctgaagtttttttggagcgtgcccaaggacaaagaagagaaggacgcccagatctacctgctgaagaatatctactacggcgagttcctgaacaagttcgtgaaaaactccaaggtgttctttaagatcaccaatgaagtgatcaagattaacaagcagcggaaccagaaaaccggccactacaagtatcagaagttcgagaacatcgagaaaaccgtgcccgtggaatacctggccatcatccagagcagagagatgatcaacaaccaggacaaagaggaaaagaatacctacatcgactttattcagcagattttcctgaagggcttcatcgactacctgaacaagaacaatctgaagtatatcgagagcaacaacaacaatgacaacaacgacatcttctccaagatcaagatcaaaaaggataacaaagagaagtacgacaagatcctgaagaactatgagaagcacaatcggaacaaagaaatccctcacgagatcaatgagttcgtgcgcgagatcaagctggggaagattctgaagtacaccgagaatctgaacatgttttacctgatcctgaagctgctgaaccacaaagagctgaccaacctgaagggcagcctggaaaagtaccagtccgccaacaaagaagaaaccttcagcgacgagttggaactgatcaacctgctgaacctggacaacaacagagtgaccgaggacttcgagctggaagccaacgagatcggcaagttcctggacttcaacgaaaacaaaatcaaggaccggaaagagctgaaaaagttcgacaccaacaagatctatttcgacggcgagaacatcatcaagcaccgggccttctacaatatcaagaaatacggcatgctgaatctgctggaaaagatcgccgataaggccaagtataagatcagcctgaaagaactgaaagagtacagcaacaagaagaatgagattgaaaagaactacaccatgcagcagaacctgcaccggaagtacgccagacccaagaaggacgaaaagttcaacgacgaggactacaaagagtatgagaaggccatcggcaacatccagaagtacacccacctgaagaacaaggtggaattcaatgagctgaacctgctgcagggcctgctgctgaagatcctgcaccggctcgtgggctacaccagcatctgggagcgggacctgagattccggctgaagggcgagtttcccgagaaccactacatcgaggaaattttcaatttcgacaactccaagaatgtgaagtacaaaagcggccagatcgtggaaaagtatatcaacttctacaaagaactgtacaaggacaatgtggaaaagcggagcatctactccgacaagaaagtgaagaaactgaagcaggaaaaaaaggacctgtacatccggaactacattgcccacttcaactacatcccccacgccgagattagcctgctggaagtgctggaaaacctgcggaagctgctgtcctacgaccggaagctgaagaacgccatcatgaagtccatcgtggacattctgaaagaatacggcttcgtggccaccttcaagatcggcgctgacaagaagatcgaaatccagaccctggaatcagagaagatcgtgcacctgaagaatctgaagaaaaagaaactgatgaccgaccggaacagcgaggaactgtgcgaactcgtgaaagtcatgttcgagtacaaggccctggaaggaggaggtggaagcggaggaggaggaagcggaggaggaggtagcgtgagtaaaggtgaagaactcttcactggagtagtgcccattctggtagagcttgatggagatgtaaatggacataaattctccgtcaggggcgaaggcgaaggggacgccacgaatggtaagctgactctgaaattcatctgtacgacgggcaaactgcccgtcccatggcctacactcgtaacgaccctcacctacggcgtgcaatgcttttctcgatatcccgaccacatgaaacagcatgactttttcaagtctgcaatgcctgaaggttatgttcaagaaaggaccatcagctttaaggatgatggtacatataaaacccgagccgaggttaaatttgaaggggacactctggttaatcgaattgaactgaaaggtattgattttaaggaggacggtaacatactggggcacaagttggagtacaactttaacagccataatgtgtatattaccgctgataagcagaaaaatgggataaaggccaactttaagatccgacataatgtcgaagatggtagtgttcaactggctgatcattaccaacaaaatacgcccatcggagatggacctgtactcttgcctgacaatcattatctctccacgcaatcaaagctttccaaggacccaaacgaaaagagagatcacatggtccttctggaatttgtgactgccgcaggcatcactctcggtatggatgagctgtacaagggatccgagggagctcccaagaaaaagcgcaaggtaggtagttcctacccatacgatgttccagattacgcttatccctacgacgtgcctgattatgcatacccatatgatgtccccgactatgccaaacggacagccgacggaagcgagttcgagtcaccaaagaagaagcggaaagtc

SEQ ID NO: 545 - DNA, 3507 bp, synthetic construct
  source 1..3507: mol_type = other DNA
atgaaacggacagccgacggaagcgagttcgagtcaccaaagaagaagcggaaagtcaacatccccgctctggtggaaaaccagaagaagtactttggcacctacagcgtgatggccatgctgaacgctcagaccgtgctggaccacatccagaaggtggccgatattgagggcgagcagaacgagaacaacgagaatctgtggtttcaccccgtgatgagccacctgtacaacgccaagaacggctacgacaagcagcccgagaaaaccatgttcatcatcgagcggctgcagagctacttcccattcctgaagatcatggccgagaaccagagagagtacagcaacggcaagtacaagcagaaccgcgtggaagtgaacagcaacgacatcttcgaggtgctgaagcgcgccttcggcgtgctgaagatgtacagggacctgaccaaccactacaagacctacgaggaaaagctgaacgacggctgcgagttcctgaccagcacagagcaacctctgagcggcatgatcaacaactactacacagtggccctgcggaacatgaacgagagatacggctacaagacagaggacctggccttcatccaggacaagcggttcaagttcgtgaaggacgcctacggcaagaaaaagtcccaagtgaataccggattcttcctgagcctgcaggactacaacggcgacacacagaagaagctgcacctgagcggagtgggaatcgccctgctgatctgcctgttcctggacaagcagtacatcaacatctttctgagcaggctgcccatcttctccagctacaatgcccagagcgaggaacggcggatcatcatcagatccttcggcatcaacagcatcaagctgcccaaggaccggatccacagcgagaagtccaacaagagcgtggccatggatatgctcaacgaagtgaagcggtgccccgacgagctgttcacaacactgtctgccgagaagcagtcccggttcagaatcatcagcgacgaccacaatgaagtgctgatgaagcggagcagcgacagattcgtgcctctgctgctgcagtatatcgattacggcaagctgttcgaccacatcaggttccacgtgaacatgggcaagctgagatacctgctgaaggccgacaagacctgcatcgacggccagaccagagtcagagtgatcgagcagcccctgaacggcttcggcagactggaagaggccgagacaatgcggaagcaagagaacggcaccttcggcaacagcggcatccggatcagagacttcgagaacatgaagcgggacgacgccaatcctgccaactatccctacatcgtggacacctacacacactacatcctggaaaacaacaaggtcgagatgtttatcaacgacaaagaggacagcgccccactgctgcccgtgatcgaggatgatagatacgtggtcaagacaatccccagctgccggatgagcaccctggaaattccagccatggccttccacatgtttctgttcggcagcaagaaaaccgagaagctgatcgtggacgtgcacaaccggtacaagagactgttccaggccatgcagaaagaagaagtgaccgccgagaatatcgccagcttcggaatcgccgagagcgacctgcctcagaagatcctggatctgatcagcggcaatgcccacggcaaggatgtggacgccttcatcagactgaccgtggacgacatgctgaccgacaccgagcggagaatcaagagattcaaggacgaccggaagtccattcggagcgccgacaacaagatgggaaagagaggcttcaagcagatctccacaggcaagctggccgacttcctggccaaggacatcgtgctgtttcagcccagcgtgaacgatggcgagaacaagatcaccggcctgaactaccggatcatgcagagcgccattgccgtgtacgatagcggcgacgattacgaggccaagcagcagttcaagctgatgttcgagaaggcccggctgatcggcaagggcacaacagagcctcatccatttctgtacaaggtgttcgcccgcagcatccccgccaatgccgtcgagttctacgagcgctacctgatcgagcggaagttctacctgaccggcctgtccaacgagatcaagaaaggcaacagagtggatgtgcccttcatccggcgggaccagaacaagtggaaaacacccgccatgaagaccctgggcagaatctacagcgaggatctgcccgtggaactgcccagacagatgttcgacaatgagatcaagtcccacctgaagtccctgccacagatggaaggcatcgacttcaacaatgccaacgtgacctatctgatcgccgagtacatgaagagagtgctggacgacgacttccagaccttctaccagtggaaccgcaactaccggtacatggacatgcttaagggcgagtacgacagaaagggctccctgcagcactgcttcaccagcgtggaagagagagaaggcctctggaaagagcgggcctccagaacagagcggtacagaaagcaggccagcaacaagatccgcagcaaccggcagatgagaaacgccagcagcgaagagatcgagacaatcctggataagcggctgagcaacagccggaacgagtaccagaaaagcgagaaagtgatccggcgctacagagtgcaggatgccctgctgtttctgctggccaaaaagaccctgaccgaactggccgatttcgacggcgagaggttcaaactgaaagaaatcatgcccgacgccgagaagggaatcctgagcgagatcatgcccatgagcttcaccttcgagaaaggcggcaagaagtacaccatcaccagcgagggcatgaagctgaagaactacggcgacttctttgtgctggctagcgacaagaggatcggcaacctgctggaactcgtgggcagcgacatcgtgtccaaagaggatatcatggaagagttcaacaaatacgaccagtgcaggcccgagatcagctccatcgtgttcaacctggaaaagtgggccttcgacacataccccgagctgtctgccagagtggaccgggaagagaaggtggacttcaagagcatcctgaaaatcctgctgaacaacaagaacatcaacaaagagcagagcgacatcctgcggaagatccggaacgccttcgatcacaacaattaccccgacaaaggcgtggtggaaatcaaggccctgcctgagatcgccatgagcatcaagaaggcctttggggagtacgccatcatgaagggatcccttcaactgcctccacttgaaagactgacactgggtagttcctacccatacgatgttccagattacgcttatccctacgacgtgcctgattatgcatacccatatgatgtccccgactatgccaaacggacagccgacggaagcgagttcgagtcaccaaagaagaagcggaaagtc

SEQ ID NO: 546 - DNA, 3123 bp, synthetic construct
  source 1..3123: mol_type = other DNA
atgaaacggacagccgacggaagcgagttcgagtcaccaaagaagaagcggaaagtcagccccaagaagaagagaaaggtggaggccagcatcgaaaaaaaaaagtccttcgccaagggcatgggcgtgaagtccacactcgtgtccggctccaaagtgtacatgacaaccttcgccgaaggcagcgacgccaggctggaaaagatcgtggagggcgacagcatcaggagcgtgaatgagggcgaggccttcagcgctgaaatggccgataaaaacgccggctataagatcggcaacgccaaattcagccatcctaagggctacgccgtggtggctaacaaccctctgtatacaggacccgtccagcaggatatgctcggcctgaaggaaactctggaaaagaggtacttcggcgagagcgctgatggcaatgacaatatttgtatccaggtgatccataacatcctggacattgaaaaaatcctcgccgaatacattaccaacgccgcctacgccgtcaacaatatctccggcctggataaggacattattggattcggcaagttctccacagtgtatacctacgacgaattcaaagaccccgagcaccatagggccgctttcaacaataacgataagctcatcaacgccatcaaggcccagtatgacgagttcgacaacttcctcgataaccccagactcggctatttcggccaggcctttttcagcaaggagggcagaaattacatcatcaattacggcaacgaatgctatgacattctggccctcctgagcggactgaggcactgggtggtccataacaacgaagaagagtccaggatctccaggacctggctctacaacctcgataagaacctcgacaacgaatacatctccaccctcaactacctctacgacaggatcaccaatgagctgaccaactccttctccaagaactccgccgccaacgtgaactatattgccgaaactctgggaatcaaccctgccgaattcgccgaacaatatttcagattcagcattatgaaagagcagaaaaacctcggattcaatatcaccaagctcagggaagtgatgctggacaggaaggatatgtccgagatcaggaaaaatcataaggtgttcgactccatcaggaccaaggtctacaccatgatggactttgtgatttataggtattacatcgaagaggatgccaaggtggctgccgccaataagtccctccccgataatgagaagtccctgagcgagaaggatatctttgtgattaacctgaggggctccttcaacgacgaccagaaggatgccctctactacgatgaagctaatagaatttggagaaagctcgaaaatatcatgcacaacatcaaggaatttaggggaaacaagacaagagagtataagaagaaggacgcccctagactgcccagaatcctgcccgctggccgtgatgtttccgccttcagcaaactcatgtatgccctgaccatgttcctggatggcaaggagatcaacgacctcctgaccaccctgattaataaattcgataacatccagagcttcctgaaggtgatgcctctcatcggagtcaacgctaagttcgtggaggaatacgcctttttcaaagactccgccaagatcgccgatgagctgaggctgatcaagtccttcgctagaatgggagaacctattgccgatgccaggagggccatgtatatcgacgccatccgtattttaggaaccaacctgtcctatgatgagctcaaggccctcgccgacaccttttccctggacgagaacggaaacaagctcaagaaaggcaagcacggcatgagaaatttcattattaataacgtgatcagcaataaaaggttccactacctgatcagatacggtgatcctgcccacctccatgagatcgccaaaaacgaggccgtggtgaagttcgtgctcggcaggatcgctgacatccagaaaaaacagggccagaacggcaagaaccagatcgacaggtactacgaaacttgtatcggaaaggataagggcaagagcgtgagcgaaaaggtggacgctctcacaaagatcatcaccggaatgaactacgaccaattcgacaagaaaaggagcgtcattgaggacaccggcagggaaaacgccgagagggagaagtttaaaaagatcatcagcctgtacctcaccgtgatctaccacatcctcaagaatattgtcaatatcaacgccaggtacgtcatcggattccattgcgtcgagcgtgatgctcaactgtacaaggagaaaggctacgacatcaatctcaagaaactggaagagaagggattcagctccgtcaccaagctctgcgctggcattgatgaaactgcccccgataagagaaaggacgtggaaaaggagatggctgaaagagccaaggagagcattgacagcctcgagagcgccaaccccaagctgtatgccaattacatcaaatacagcgacgagaagaaagccgaggagttcaccaggcagattaacagggagaaggccaaaaccgccctgaacgcctacctgaggaacaccaagtggaatgtgatcatcagggaggacctcctgagaattgacaacaagacatgtaccctgttcagaaacaaggccgtccacctggaagtggccaggtatgtccacgcctatatcaacgacattgccgaggtcaattcctacttccaactgtaccattacatcatgcagagaattatcatgaatgagaggtacgagaaaagcagcggaaaggtgtccgagtacttcgacgctgtgaatgacgagaagaagtacaacgataggctcctgaaactgctgtgtgtgcctttcggctactgtatccccaggtttaagaacctgagcatcgaggccctgttcgataggaacgaggccgccaagttcgacaaggagaaaaagaaggtgtccggcaattccggatccggacctaagaaaaagaggaaggtggcggccgcttacccatacgatgttccagattacgctgctagcggcagtggaaaacggacagccgacggaagcgagttcgagtcaccaaagaagaagcggaaagtc

SEQ ID NO: 547 - DNA, 3978 bp, synthetic construct
  source 1..3978: mol_type = other DNA
atgaaacggacagccgacggaagcgagttcgagtcaccaaagaagaagcggaaagtcacgactactatgaagatttcaattgaattcctcgagccgtttcggatgaccaaatggcaggaaagcactaggcgaaacaagaacaacaaggaatttgttcgcggccaagcttttgcaagatggcatagaaataagaaggataacacaaaagggcggccttacataactgggacattgctgcggtccgcagtaattagaagcgcggaaaacctgctgacattgagtgatgggaaaattagcgaaaagacatgttgtcctgggaaatttgatacggaagataaagacaggttgctgcaattgaggcagcggtccacccttcgttggaccgataagaacccctgtccagataacgctgaaacttactgcccgttttgcgaacttctcgggagatccggtaacgatggaaagaaggctgagaagaaggattggcgctttcgtattcattttggcaatctttcccttccagggaagcccgatttcgacgggccaaaagctataggcagccaacgggtacttaacagggtcgatttcaaatccggtaaggcccatgacttctttaaggcttacgaagtcgaccatactaggtttccccgcttcgaaggggagattaccatagataataaagtcagcgctgaagccaggaaactgctctgtgattctctcaagtttacggatcggctgtgtggagctctgtgcgtaatcaggttcgatgaatatacaccagcagccgatagtgggaaacaaaccgaaaatgtccaagcagaaccgaatgctaatctcgctgaaaagaccgcagagcaaattattagcattctggacgataataagaaaaccgaatatacccgcctgcttgctgatgctattcgttcactccgccgctctagtaaacttgtcgctggcttgccaaaggatcatgacgggaaggatgaccattacctctgggatatcggcaagaagaagaaagacgaaaactctgtcactattaggcaaatccttacgacctcagcagacaccaaggaactcaagaatgccggaaaatggagagaattctgcgagaagctgggtgaagcgctgtacctcaagagtaaagacatgagtggcggcctgaaaattactcggagaatactgggcgatgctgaattccatggaaagcccgatcggcttgaaaagagccggtctgtgtcaatcggatctgtgttgaaagaaactgtggtatgcggcgaactggtcgctaaaacgcccttcttcttcggagcgatagacgaagatgcaaaacaaaccgacctgcaagtactcctcactcccgataacaagtatagactgccaagaagcgccgtgcgaggtatactccgtcgagatcttcaaacctattttgatagcccatgcaatgctgagttgggtggacggccatgcatgtgtaagacgtgtaggattatgagagggatcacggtgatggatgcgcgcagtgagtacaatgccccgccagaaataaggcatcgtacccgcattaatcccttcacaggcacggttgcggaaggtgccctgtttaatatggaagtagcccccgaggggattgtctttccatttcaactccggtaccggggctctgaagatgggctgcccgatgcactgaaaacggtgttgaaatggtgggctgaggggcaggcattcatgagtggcgctgcctcaaccgggaagggccgattccggatggaaaatgctaaatatgaaacgctggatctgagcgacgagaatcaaaggaatgactatcttaagaattggggatggcgtgacgagaaggggctcgaggaactgaagaaacgactgaactcaggtctgccagagcccggtaattatagggatccaaaatggcacgagattaacgtttccattgagatggcaagcccttttattaatggcgacccaatccgcgcagccgtggacaaacgtggtacagatgtggttaccttcgttaagtataaagctgaaggggaagaggcgaaacccgtatgtgcatacaaggccgaatcttttagaggggtgatcagaagtgccgtggcacgcattcatatggaagatggcgtccctttgactgagttgactcacagtgactgtgaatgtctcctgtgccaaatctttggaagtgagtatgaagccggcaaaataaggtttgaagatctcgtattcgaaagtgacccggaacctgtgaccttcgatcatgtggccatcgatagattcactggcggtgcagctgataagaagaaattcgatgattcccctctgcccggtagccctgcaagaccgctcatgttgaaaggctccttctggatccgcagggacgttctcgaggacgaagagtactgtaaggcactcggtaaggctcttgcagatgtgaataatggcctttatcccctcggtggaaagagcgccatcggctacggacaggtcaagagtctgggtataaagggagatgataagaggatttctcgcctcatgaatcctgcctttgatgagacagatgtagccgttccagaaaagcccaaaactgatgccgaggttcgcatcgaggcagagaaagtatattacccacactatttcgtcgaaccccataagaaggtggaacgcgaggagaaaccctgtggtcatcaaaagttccacgaggggcgactgacaggtaaaattcggtgtaagctcattaccaagacacccctcatcgtcccagatactagtaatgacgatttcttcagacctgcggataaagaagctcggaaggaaaaggacgaatatcataaatcatatgctttcttcagacttcataaacaaatcatgattcccgggagcgaattgagaggaatggtgagtagtgtctacgaaactgtgacaaattcttgcttcaggatatttgatgagactaaacggttgtcatggcgggggggtgggtcacgaactgtagacgataggatgatcggcaaacgtatgagcgccgatctgcggccgtgccatggagattgggtggaagatggtgatctcagtgccttgaatgcatatcccgagaaaagactcctcttgcgccaccccaaaggactctgccctgcttgccggctctttggaaccggatcttacaagggcagagtcaggtttggattcgcgtcactcgaaaacgatccggagtggctgatcccaggcaagaatcccggcgatccgtttcacggcgggccggtgatgctctcattgttggaacggcctcgcccgacttggagtataccgggatccgacaataagtttaaagtgcctggcagaaagttttacgtccaccaccacgcctggaaaaccattaaggacgggaaccatcccacaacaggcaaagctattgaacaaagccctaataaccgcactgtagaagctctcgccggcgggaattcctttagcttcgaaattgcctttgagaacctgaaagaatgggagctgggtttgctcatccacagcctgcaactcgaaaagggtctggcgcataaacttggaatggcaaagtctatgggatttggttcagttgaaattgacgtcgaatcagtgcgcctgagaaaagattggaagcaatggcggaatggcaattccgaaattcccaactggttgggaaaaggatttgctaaactgaaggaatggttccgggacgagctcgattttatagaaaatcttaagaaacttctttggtttcctgagggcgaccaagcaccccgggtttgctaccccatgctgcgaaagaaggacgatcctaatgggaatagcggttacgaagaactcaaaagaggggaattcaagaaagaagatcggcagaagaagctgaccacgccgtggacaccgtgggcaaaacggacagccgacggaagcgagttcgagtcaccaaagaagaagcggaaagtc

SEQ ID NO: 548 - DNA, 4911 bp, synthetic construct
  source 1..4911: mol_type = other DNA
atgaaacggacagccgacggaagcgagttcgagtcaccaaagaagaagcggaaagtcacgactactatgaagatttcaattgaattcctcgagccgtttcggatgaccaaatggcaggaaagcactaggcgaaacaagaacaacaaggaatttgttcgcggccaagcttttgcaagatggcatagaaataagaaggataacacaaaagggcggccttacataactgggacattgctgcggtccgcagtaattagaagcgcggaaaacctgctgacattgagtgatgggaaaattagcgaaaagacatgttgtcctgggaaatttgatacggaagataaagacaggttgctgcaattgaggcagcggtccacccttcgttggaccgataagaacccctgtccagataacgctgaaacttactgcccgttttgcgaacttctcgggagatccggtaacgatggaaagaaggctgagaagaaggattggcgctttcgtattcattttggcaatctttcccttccagggaagcccgatttcgacgggccaaaagctataggcagccaacgggtacttaacagggtcgatttcaaatccggtaaggcccatgacttctttaaggcttacgaagtcgaccatactaggtttccccgcttcgaaggggagattaccatagataataaagtcagcgctgaagccaggaaactgctctgtgattctctcaagtttacggatcggctgtgtggagctctgtgcgtaatcaggttcgatgaatatacaccagcagccgatagtgggaaacaaaccgaaaatgtccaagcagaaccgaatgctaatctcgctgaaaagaccgcagagcaaattattagcattctggacgataataagaaaaccgaatatacccgcctgcttgctgatgctattcgttcactccgccgctctagtaaacttgtcgctggcttgccaaaggatcatgacgggaaggatgaccattacctctgggatatcggcaagaagaagaaagacgaaaactctgtcactattaggcaaatccttacgacctcagcagacaccaaggaactcaagaatgccggaaaatggagagaattctgcgagaagctgggtgaagcgctgtacctcaagagtaaagacatgagtggcggcctgaaaattactcggagaatactgggcgatgctgaattccatggaaagcccgatcggcttgaaaagagccggtctgtgtcaatcggatctgtgttgaaagaaactgtggtatgcggcgaactggtcgctaaaacgcccttcttcttcggagcgatagacgaagatgcaaaacaaaccgacctgcaagtactcctcactcccgataacaagtatagactgccaagaagcgccgtgcgaggtatactccgtcgagatcttcaaacctattttgatagcccatgcaatgctgagttgggtggacggccatgcatgtgtaagacgtgtaggattatgagagggatcacggtgatggatgcgcgcagtgagtacaatgccccgccagaaataaggcatcgtacccgcattaatcccttcacaggcacggttgcggaaggtgccctgtttaatatggaagtagcccccgaggggattgtctttccatttcaactccggtaccggggctctgaagatgggctgcccgatgcactgaaaacggtgttgaaatggtgggctgaggggcaggcattcatgagtggcgctgcctcaaccgggaagggccgattccggatggaaaatgctaaatatgaaacgctggatctgagcgacgagaatcaaaggaatgactatcttaagaattggggatggcgtgacgagaaggggctcgaggaactgaagaaacgactgaactcaggtctgccagagcccggtaattatagggatccaaaatggcacgagattaacgtttccattgagatggcaagcccttttattaatggcgacccaatccgcgcagccgtggacaaacgtggtacagatgtggttaccttcgttaagtataaagctgaaggggaagaggcgaaacccgtatgtgcatacaaggccgaatcttttagaggggtgatcagaagtgccgtggcacgcattcatatggaagatggcgtccctttgactgagttgactcacagtgactgtgaatgtctcctgtgccaaatctttggaagtgagtatgaagccggcaaaataaggtttgaagatctcgtattcgaaagtgacccggaacctgtgaccttcgatcatgtggccatcgatagattcactggcggtgcagctgataagaagaaattcgatgattcccctctgcccggtagccctgcaagaccgctcatgttgaaaggctccttctggatccgcagggacgttctcgaggacgaagagtactgtaaggcactcggtaaggctcttgcagatgtgaataatggcctttatcccctcggtggaaagagcgccatcggctacggacaggtcaagagtctgggtataaagggagatgataagaggatttctcgcctcatgaatcctgcctttgatgagacagatgtagccgttccagaaaagcccaaaactgatgccgaggttcgcatcgaggcagagaaagtatattacccacactatttcgtcgaaccccataagaaggtggaacgcgaggagaaaccctgtggtcatcaaaagttccacgaggggcgactgacaggtaaaattcggtgtaagctcattaccaagacacccctcatcgtcccagatactagtaatgacgatttcttcagacctgcggataaagaagctcggaaggaaaaggacgaatatcataaatcatatgctttcttcagacttcataaacaaatcatgattcccgggagcgaattgagaggaatggtgagtagtgtctacgaaactgtgacaaattcttgcttcaggatatttgatgagactaaacggttgtcatggcggatggatgctgatcaccagaatgtgctgcaagactttctcccaggtcgagtgaccgccgatgggaaacatatacaaaagttttccgaaactgcaagggtgcctttctatgacaaaacgcagaaacattttgacattcttgatgagcaagaaattgctggtgagaaacctgttcggatgtgggtcaagcgttttattaaacgactgagcctcgttgatcctgctaaacacccccagaagaaacaagacaataaatggaaaagacgcaaagaaggcatcgccacatttatagagcaaaagaatggctcttattattttaacgtggtcaccaataatggctgcacttctttccacttgtggcataaacctgacaattttgaccaggagaaactcgaaggcatacagaatggtgagaaactggattgctgggtaagagatagtagataccaaaaggcctttcaagagatacccgagaacgacccagacggatgggagtgtaaagagggctaccttcatgtcgtcggccccagcaaagtagagtttagtgacaagaaaggggatgtgatcaataactttcaaggaacactcccatcagttcccaacgactggaaaacaattaggacgaacgattttaagaataggaaaaggaagaatgaacctgtgttttgttgtgaggatgataagggcaattactataccatggctaaatattgcgaaaccttcttcttcgatctgaaggagaacgaggaatacgagatccccgagaaagcaagaatcaaatacaaagaactgctcagggtctataacaacaatcctcaagcagtgccggagagcgtatttcagtctagagttgcccgggaaaacgtggaaaagctgaagtccggagatcttgtgtatttcaaacataatgaaaagtacgtagaggacatcgtcccagtgcggatttcccgaactgtagacgataggatgatcggcaaacgtatgagcgccgatctgcggccgtgccatggagattgggtggaagatggtgatctcagtgccttgaatgcatatcccgagaaaagactcctcttgcgccaccccaaaggactctgccctgcttgccggctctttggaaccggatcttacaagggcagagtcaggtttggattcgcgtcactcgaaaacgatccggagtggctgatcccaggcaagaatcccggcgatccgtttcacggcgggccggtgatgctctcattgttggaacggcctcgcccgacttggagtataccgggatccgacaataagtttaaagtgcctggcagaaagttttacgtccaccaccacgcctggaaaaccattaaggacgggaaccatcccacaacaggcaaagctattgaacaaagccctaataaccgcactgtagaagctctcgccggcgggaattcctttagcttcgaaattgcctttgagaacctgaaagaatgggagctgggtttgctcatccacagcctgcaactcgaaaagggtctggcgcataaacttggaatggcaaagtctatgggatttggttcagttgaaattgacgtcgaatcagtgcgcctgagaaaagattggaagcaatggcggaatggcaattccgaaattcccaactggttgggaaaaggatttgctaaactgaaggaatggttccgggacgagctcgattttatagaaaatcttaagaaacttctttggtttcctgagggcgaccaagcaccccgggtttgctaccccatgctgcgaaagaaggacgatcctaatgggaatagcggttacgaagaactcaaaagaggggaattcaagaaagaagatcggcagaagaagctgaccacgccgtggacaccgtgggcaaaacggacagccgacggaagcgagttcgagtcaccaaagaagaagcggaaagtc

SEQ ID NO: 549 - DNA, 4911 bp, synthetic construct
  source 1..4911: mol_type = other DNA
atgaaacggacagccgacggaagcgagttcgagtcaccaaagaagaagcggaaagtcacgactactatgaagatttcaattgaattcctcgagccgtttcggatgaccaaatggcaggaaagcactaggcgaaacaagaacaacaaggaatttgttcgcggccaagcttttgcaagatggcatagaaataagaaggataacacaaaagggcggccttacataactgggacattgctgcggtccgcagtaattagaagcgcggaaaacctgctgacattgagtgatgggaaaattagcgaaaagacatgttgtcctgggaaatttgatacggaagataaagacaggttgctgcaattgaggcagcggtccacccttcgttggaccgataagaacccctgtccagataacgctgaaacttactgcccgttttgcgaacttctcgggagatccggtaacgatggaaagaaggctgagaagaaggattggcgctttcgtattcattttggcaatctttcccttccagggaagcccgatttcgacgggccaaaagctataggcagccaacgggtacttaacagggtcgatttcaaatccggtaaggcccatgacttctttaaggcttacgaagtcgaccatactaggtttccccgcttcgaaggggagattaccatagataataaagtcagcgctgaagccaggaaactgctctgtgattctctcaagtttacggatcggctgtgtggagctctgtgcgtaatcaggttcgatgaatatacaccagcagccgatagtgggaaacaaaccgaaaatgtccaagcagaaccgaatgctaatctcgctgaaaagaccgcagagcaaattattagcattctggacgataataagaaaaccgaatatacccgcctgcttgctgatgctattcgttcactccgccgctctagtaaacttgtcgctggcttgccaaaggatcatgacgggaaggatgaccattacctctgggatatcggcaagaagaagaaagacgaaaactctgtcactattaggcaaatccttacgacctcagcagacaccaaggaactcaagaatgccggaaaatggagagaattctgcgagaagctgggtgaagcgctgtacctcaagagtaaagacatgagtggcggcctgaaaattactcggagaatactgggcgatgctgaattccatggaaagcccgatcggcttgaaaagagccggtctgtgtcaatcggatctgtgttgaaagaaactgtggtatgcggcgaactggtcgctaaaacgcccttcttcttcggagcgatagacgaagatgcaaaacaaaccgacctgcaagtactcctcactcccgataacaagtatagactgccaagaagcgccgtgcgaggtatactccgtcgagatcttcaaacctattttgatagcccatgcaatgctgagttgggtggacggccatgcatgtgtaagacgtgtaggattatgagagggatcacggtgatggatgcgcgcagtgagtacaatgccccgccagaaataaggcatcgtacccgcattaatcccttcacaggcacggttgcggaaggtgccctgtttaatatggaagtagcccccgaggggattgtctttccatttcaactccggtaccggggctctgaagatgggctgcccgatgcactgaaaacggtgttgaaatggtgggctgaggggcaggcattcatgagtggcgctgcctcaaccgggaagggccgattccggatggaaaatgctaaatatgaaacgctggatctgagcgacgagaatcaaaggaatgactatcttaagaattggggatggcgtgacgagaaggggctcgaggaactgaagaaacgactgaactcaggtctgccagagcccggtaattatagggatccaaaatggcacgagattaacgtttccattgagatggcaagcccttttattaatggcgacccaatccgcgcagccgtggacaaacgtggtacagatgtggttaccttcgttaagtataaagctgaaggggaagaggcgaaacccgtatgtgcatacaaggccgaatcttttagaggggtgatcagaagtgccgtggcacgcattcatatggaagatggcgtccctttgactgagttgactcacagtgactgtgaatgtctcctgtgccaaatctttggaagtgagtatgaagccggcaaaataaggtttgaagatctcgtattcgaaagtgacccggaacctgtgaccttcgatcatgtggccatcgatagattcactggcggtgcagctgataagaagaaattcgatgattcccctctgcccggtagccctgcaagaccgctcatgttgaaaggctccttctggatccgcagggacgttctcgaggacgaagagtactgtaaggcactcggtaaggctcttgcagatgtgaataatggcctttatcccctcggtggaaagagcgccatcggctacggacaggtcaagagtctgggtataaagggagatgataagaggatttctcgcctcatgaatcctgcctttgatgagacagatgtagccgttccagaaaagcccaaaactgatgccgaggttcgcatcgaggcagagaaagtatattacccacactatttcgtcgaaccccataagaaggtggaacgcgaggagaaaccctgtggtcatcaaaagttccacgaggggcgactgacaggtaaaattcggtgtaagctcattaccaagacacccctcatcgtcccagatactagtaatgacgatttcttcagacctgcggataaagaagctcggaaggaaaaggacgaatatcataaatcatatgctttcttcagacttcataaacaaatcatgattcccgggagcgaattgagaggaatggtgagtagtgtctacgaaactgtgacaaattcttgcttcaggatatttgatgagactaaacggttgtcatggcggatggatgctgatcaccagaatgtgctgcaaaagtttctcccaggtcgagtgaccgccgatgggaaacatatacaaaagttttccgaaactgcaagggtgcctttctatgacaaaacgcagaaacattttgacattcttgatgagcaagaaattgctggtgagaaacctgttcggatgtgggtcaagcgttttattaaacgactgagcctcgttgatcctgctaaacacccccagaagaaacaagacaataaatggaaaagacgcaaagaaggcatcgccacatttatagagcaaaagaatggctcttattattttaacgtggtcaccaataatggctgcacttctttccacttgtggcataaacctgacaattttgaccaggagaaactcgaaggcatacagaatggtgagaaactggattgctgggtaagagatagtagataccaaaaggcctttcaagagatacccgagaacgacccagacggatgggagtgtaaagagggctaccttcatgtcgtcggccccagcaaagtagagtttagtgacaagaaaggggatgtgatcaataactttcaaggaacactcccatcagttcccaacgactggaaaacaattaggacgaacgattttaagaataggaaaaggaagaatgaacctgtgttttgttgtgaggatgataagggcaattactataccatggctaaatattgcgaaaccttcttcttcgatctgaaggagaacgaggaatacgagatccccgagaaagcaagaatcaaatacaaagaactgctcagggtctataacaacaatcctcaagcagtgccggagagcgtatttcagtctagagttgcccgggaaaacgtggaaaagctgaagtccggagatcttgtgtatttcaaacataatgaaaagtacgtagaggacatcgtcccagtgcggatttcccgaactgtagacgataggatgatcggcaaacgtatgagcgccgatctgcggccgtgccatggagattgggtggaagatggtgatctcagtgccttgaatgcatatcccgagaaaagactcctcttgcgccaccccaaaggactctgccctgcttgccggctctttggaaccggatcttacaagggcagagtcaggtttggattcgcgtcactcgaaaacgatccggagtggctgatcccaggcaagaatcccggcgatccgtttcacggcgggccggtgatgctctcattgttggaacggcctcgcccgacttggagtataccgggatccgacaataagtttaaagtgcctggcagaaagttttacgtccaccaccacgcctggaaaaccattaaggacgggaaccatcccacaacaggcaaagctattgaacaaagccctaataaccgcactgtagaagctctcgccggcgggaattcctttagcttcgaaattgcctttgagaacctgaaagaatgggagctgggtttgctcatccacagcctgcaactcgaaaagggtctggcgcataaacttggaatggcaaagtctatgggatttggttcagttgaaattgacgtcgaatcagtgcgcctgagaaaagattggaagcaatggcggaatggcaattccgaaattcccaactggttgggaaaaggatttgctaaactgaaggaatggttccgggacgagctcgattttatagaaaatcttaagaaacttctttggtttcctgagggcgaccaagcaccccgggtttgctaccccatgctgcgaaagaaggacgatcctaatgggaatagcggttacgaagaactcaaaagaggggaattcaagaaagaagatcggcagaagaagctgaccacgccgtggacaccgtgggcaaaacggacagccgacggaagcgagttcgagtcaccaaagaagaagcggaaagtc

SEQ ID NO: 550 - DNA, 4911 bp, synthetic construct
  source 1..4911: mol_type = other DNA
atgaaacggacagccgacggaagcgagttcgagtcaccaaagaagaagcggaaagtcacgactactatgaagatttcaattgaattcctcgagccgtttcggatgaccaaatggcaggaaagcactaggcgaaacaagaacaacaaggaatttgttcgcggccaagcttttgcaagatggcatagaaataagaaggataacacaaaagggcggccttacataactgggacattgctgcggtccgcagtaattagaagcgcggaaaacctgctgacattgagtgatgggaaaattagcgaaaagacatgttgtcctgggaaatttgatacggaagataaagacaggttgctgcaattgaggcagcggtccacccttcgttggaccgataagaacccctgtccagataacgctgaaacttactgcccgttttgcgaacttctcgggagatccggtaacgatggaaagaaggctgagaagaaggattggcgctttcgtattcattttggcaatctttcccttccagggaagcccgatttcgacgggccaaaagctataggcagccaacgggtacttaacagggtcgatttcaaatccggtaaggcccatgacttctttaaggcttacgaagtcgaccatactaggtttccccgcttcgaaggggagattaccatagataataaagtcagcgctgaagccaggaaactgctctgtgattctctcaagtttacggatcggctgtgtggagctctgtgcgtaatcaggttcgatgaatatacaccagcagccgatagtgggaaacaaaccgaaaatgtccaagcagaaccgaatgctaatctcgctgaaaagaccgcagagcaaattattagcattctggacgataataagaaaaccgaatatacccgcctgcttgctgatgctattcgttcactccgccgctctagtaaacttgtcgctggcttgccaaaggatcatgacgggaaggatgaccattacctctgggatatcggcaagaagaagaaagacgaaaactctgtcactattaggcaaatccttacgacctcagcagacaccaaggaactcaagaatgccggaaaatggagagaattctgcgagaagctgggtgaagcgctgtacctcaagagtaaagacatgagtggcggcctgaaaattactcggagaatactgggcgatgctgaattccatggaaagcccgatcggcttgaaaagagccggtctgtgtcaatcggatctgtgttgaaagaaactgtggtatgcggcgaactggtcgctaaaacgcccttcttcttcggagcgatagacgaagatgcaaaacaaaccgacctgcaagtactcctcactcccgataacaagtatagactgccaagaagcgccgtgcgaggtatactccgtcgagatcttcaaacctattttgatagcccatgcaatgctgagttgggtggacggccatgcatgtgtaagacgtgtaggattatgagagggatcacggtgatggatgcgcgcagtgagtacaatgccccgccagaaataaggcatcgtacccgcattaatcccttcacaggcacggttgcggaaggtgccctgtttaatatggaagtagcccccgaggggattgtctttccatttcaactccggtaccggggctctgaagatgggctgcccgatgcactgaaaacggtgttgaaatggtgggctgaggggcaggcattcatgagtggcgctgcctcaaccgggaagggccgattccggatggaaaatgctaaatatgaaacgctggatctgagcgacgagaatcaaaggaatgactatcttaagaattggggatggcgtgacgagaaggggctcgaggaactgaagaaacgactgaactcaggtctgccagagcccggtaattatagggatccaaaatggcacgagattaacgtttccattgagatggcaagcccttttattaatggcgacccaatccgcgcagccgtggacaaacgtggtacagatgtggttaccttcgttaagtataaagctgaaggggaagaggcgaaacccgtatgtgcatacaaggccgaatcttttagaggggtgatcagaagtgccgtggcacgcattcatatggaagatggcgtccctttgactgagttgactcacagtgactgtgaatgtctcctgtgccaaatctttggaagtgagtatgaagccggcaaaataaggtttgaagatctcgtattcgaaagtgacccggaacctgtgaccttcgatcatgtggccatcgatagattcactggcggtgcagctgataagaagaaattcgatgattcccctctgcccggtagccctgcaagaccgctcatgttgaaaggctccttctggatccgcagggacgttctcgaggacgaagagtactgtaaggcactcggtaaggctcttgcagatgtgaataatggcctttatcccctcggtggaaagagcgccatcggctacggacaggtcaagagtctgggtataaagggagatgataagaggatttctcgcctcatgaatcctgcctttgatgagacagatgtagccgttccagaaaagcccaaaactgatgccgaggttcgcatcgaggcagagaaagtatattacccacactatttcgtcgaaccccataagaaggtggaacgcgaggagaaaccctgtggtcatcaaaagttccacgaggggcgactgacaggtaaaattcggtgtaagctcattaccaagacacccctcatcgtcccagatactagtaatgacgatttcttcagacctgcggataaagaagctcggaaggaaaaggacgaatatcataaatcatatgctttcttcagacttcataaacaaatcatgattcccgggagcgaattgagaggaatggtgagtagtgtctacgaaactgtgacaaattcttgcttcaggatatttgatgagactaaacggttgtcatggcggatggatgctaagcaccagaatgtgctgcaaaagtttctcccaggtcgagtgaccgccgatgggaaacatatacaaaagttttccgaaactgcaagggtgcctttctatgacaaaacgcagaaacattttgacattcttgatgagcaagaaattgctggtgagaaacctgttcggatgtgggtcaagcgttttattaaacgactgagcctcgttgatcctgctaaacacccccagaagaaacaagacaataaatggaaaagacgcaaagaaggcatcgccacatttatagagcaaaagaatggctcttattattttaacgtggtcaccaataatggctgcacttctttccacttgtggcataaacctgacaattttgaccaggagaaactcgaaggcatacagaatggtgagaaactggattgctgggtaagagatagtagataccaaaaggcctttcaagagatacccgagaacgacccagacggatgggagtgtaaagagggctaccttcatgtcgtcggccccagcaaagtagagtttagtgacaagaaaggggatgtgatcaataactttcaaggaacactcccatcagttcccaacgactggaaaacaattaggacgaacgattttaagaataggaaaaggaagaatgaacctgtgttttgttgtgaggatgataagggcaattactataccatggctaaatattgcgaaaccttcttcttcgatctgaaggagaacgaggaatacgagatccccgagaaagcaagaatcaaatacaaagaactgctcagggtctataacaacaatcctcaagcagtgccggagagcgtatttcagtctagagttgcccgggaaaacgtggaaaagctgaagtccggagatcttgtgtatttcaaacataatgaaaagtacgtagaggacatcgtcccagtgcggatttcccgaactgtagacgataggatgatcggcaaacgtatgagcgccgatctgcggccgtgccatggagattgggtggaagatggtgatctcagtgccttgaatgcatatcccgagaaaagactcctcttgcgccaccccaaaggactctgccctgcttgccggctctttggaaccggatcttacaagggcagagtcaggtttggattcgcgtcactcgaaaacgatccggagtggctgatcccaggcaagaatcccggcgatccgtttcacggcgggccggtgatgctctcattgttggaacggcctcgcccgacttggagtataccgggatccgacaataagtttaaagtgcctggcagaaagttttacgtccaccaccacgcctggaaaaccattaaggacgggaaccatcccacaacaggcaaagctattgaacaaagccctaataaccgcactgtagaagctctcgccggcgggaattcctttagcttcgaaattgcctttgagaacctgaaagaatgggagctgggtttgctcatccacagcctgcaactcgaaaagggtctggcgcataaacttggaatggcaaagtctatgggatttggttcagttgaaattgacgtcgaatcagtgcgcctgagaaaagattggaagcaatggcggaatggcaattccgaaattcccaactggttgggaaaaggatttgctaaactgaaggaatggttccgggacgagctcgattttatagaaaatcttaagaaacttctttggtttcctgagggcgaccaagcaccccgggtttgctaccccatgctgcgaaagaaggacgatcctaatgggaatagcggttacgaagaactcaaaagaggggaattcaagaaagaagatcggcagaagaagctgaccacgccgtggacaccgtgggcaaaacggacagccgacggaagcgagttcgagtcaccaaagaagaagcggaaagtc

SEQ ID NO: 551 - DNA, 4911 bp, synthetic construct
  source 1..4911: mol_type = other DNA
atgaaacggacagccgacggaagcgagttcgagtcaccaaagaagaagcggaaagtcacgactactatgaagatttcaattgaattcctcgagccgtttcggatgaccaaatggcaggaaagcactaggcgaaacaagaacaacaaggaatttgttcgcggccaagcttttgcaagatggcatagaaataagaaggataacacaaaagggcggccttacataactgggacattgctgcggtccgcagtaattagaagcgcggaaaacctgctgacattgagtgatgggaaaattagcgaaaagacatgttgtcctgggaaatttgatacggaagataaagacaggttgctgcaattgaggcagcggtccacccttcgttggaccgataagaacccctgtccagataacgctgaaacttactgcccgttttgcgaacttctcgggagatccggtaacgatggaaagaaggctgagaagaaggattggcgctttcgtattcattttggcaatctttcccttccagggaagcccgatttcgacgggccaaaagctataggcagccaacgggtacttaacagggtcgatttcaaatccggtaaggcccatgacttctttaaggcttacgaagtcgaccatactaggtttccccgcttcgaaggggagattaccatagataataaagtcagcgctgaagccaggaaactgctctgtgattctctcaagtttacggatcggctgtgtggagctctgtgcgtaatcaggttcgatgaatatacaccagcagccgatagtgggaaacaaaccgaaaatgtccaagcagaaccgaatgctaatctcgctgaaaagaccgcagagcaaattattagcattctggacgataataagaaaaccgaatatacccgcctgcttgctgatgctattcgttcactccgccgctctagtaaacttgtcgctggcttgccaaaggatcatgacgggaaggatgaccataagctctgggatatcggcaagaagaagaaagacgaaaactctgtcactattaggcaaatccttacgacctcagcagacaccaaggaactcaagaatgccggaaaatggagagaattctgcgagaagctgggtgaagcgctgtacctcaagagtaaagacatgagtggcggcctgaaaattactcggagaatactgggcgatgctgaattccatggaaagcccgatcggcttgaaaagagccggtctgtgtcaatcggatctgtgttgaaagaaactgtggtatgcggcgaactggtcgctaaaacgcccttcttcttcggagcgatagacgaagatgcaaaacaaaccgacctgcaagtactcctcactcccgataacaagtatagactgccaagaagcgccgtgcgaggtatactccgtcgagatcttcaaacctattttgatagcccatgcaatgctgagttgggtggacggccatgcatgtgtaagacgtgtaggattatgagagggatcacggtgatggatgcgcgcagtgagtacaatgccccgccagaaataaggcatcgtacccgcattaatcccttcacaggcacggttgcggaaggtgccctgtttaatatggaagtagcccccgaggggattgtctttccatttcaactccggtaccggggctctgaagatgggctgcccgatgcactgaaaacggtgttgaaatggtgggctgaggggcaggcattcatgagtggcgctgcctcaaccgggaagggccgattccggatggaaaatgctaaatatgaaacgctggatctgagcgacgagaatcaaaggaatgactatcttaagaattggggatggcgtgacgagaaggggctcgaggaactgaagaaacgactgaactcaggtctgccagagcccggtaattatagggatccaaaatggcacgagattaacgtttccattgagatggcaagcccttttattaatggcgacccaatccgcgcagccgtggacaaacgtggtacagatgtggttaccttcgttaagtataaagctgaaggggaagaggcgaaacccgtatgtgcatacaaggccgaatcttttagaggggtgatcagaagtgccgtggcacgcattcatatggaagatggcgtccctttgactgagttgactcacagtgactgtgaatgtctcctgtgccaaatctttggaagtgagtatgaagccggcaaaataaggtttgaagatctcgtattcgaaagtgacccggaacctgtgaccttcgatcatgtggccatcgatagattcactggcggtgcagctgataagaagaaattcgatgattcccctctgcccggtagccctgcaagaccgctcatgttgaaaggctccttctggatccgcagggacgttctcgaggacgaagagtactgtaaggcactcggtaaggctcttgcagatgtgaataatggcctttatcccctcggtggaaagagcgccatcggctacggacaggtcaagagtctgggtataaagggagatgataagaggatttctcgcctcatgaatcctgcctttgatgagacagatgtagccgttccagaaaagcccaaaactgatgccgaggttcgcatcgaggcagagaaagtatattacccacactatttcgtcgaaccccataagaaggtggaacgcgaggagaaaccctgtggtcatcaaaagttccacgaggggcgactgacaggtaaaattcggtgtaagctcattaccaagacacccctcatcgtcccagatactagtaatgacgatttcttcagacctgcggataaagaagctcggaaggaaaaggacgaatatcataaatcatatgctttcttcagacttcataaacaaatcatgattcccgggagcgaattgagaggaatggtgagtagtgtctacgaaactgtgacaaattcttgcttcaggatatttgatgagactaaacggttgtcatggcggatggatgctaagcaccagaatgtgctgcaaaagtttctcccaggtcgagtgaccgccgatgggaaacatatacaaaagttttccgaaactgcaagggtgcctttctatgacaaaacgcagaaacattttgacattcttgatgagcaagaaattgctggtgagaaacctgttcggatgtgggtcaagcgttttattaaacgactgagcctcgttgatcctgctaaacacccccagaagaaacaagacaataaatggaaaagacgcaaagaaggcatcgccacatttatagagcaaaagaatggctcttattattttaacgtggtcaccaataatggctgcacttctttccacttgtggcataaacctgacaattttgaccaggagaaactcgaaggcatacagaatggtgagaaactggattgctgggtaagagatagtagataccaaaaggcctttcaagagatacccgagaacgacccagacggatgggagtgtaaagagggctaccttcatgtcgtcggccccagcaaagtagagtttagtgacaagaaaggggatgtgatcaataactttcaaggaacactcccatcagttcccaacgactggaaaacaattaggacgaacgattttaagaataggaaaaggaagaatgaacctgtgttttgttgtgaggatgataagggcaattactataccatggctaaatattgcgaaaccttcttcttcgatctgaaggagaacgaggaatacgagatccccgagaaagcaagaatcaaatacaaagaactgctcagggtctataacaacaatcctcaagcagtgccggagagcgtatttcagtctagagttgcccgggaaaacgtggaaaagctgaagtccggagatcttgtgtatttcaaacataatgaaaagtacgtagaggacatcgtcccagtgcggatttcccgaactgtagacgataggatgatcggcaaacgtatgagcgccgatctgcggccgtgccatggagattgggtggaagatggtgatctcagtgccttgaatgcatatcccgagaaaagactcctcttgcgccaccccaaaggactctgccctgcttgccggctctttggaaccggatcttacaagggcagagtcaggtttggattcgcgtcactcgaaaacgatccggagtggctgatcccaggcaagaatcccggcgatccgtttcacggcgggccggtgatgctctcattgttggaacggcctcgcccgacttggagtataccgggatccgacaataagtttaaagtgcctggcagaaagttttacgtccaccaccacgcctggaaaaccattaaggacgggaaccatcccacaacaggcaaagctattgaacaaagccctaataaccgcactgtagaagctctcgccggcgggaattcctttagcttcgaaattgcctttgagaacctgaaagaatgggagctgggtttgctcatccacagcctgcaactcgaaaagggtctggcgcataaacttggaatggcaaagtctatgggatttggttcagttgaaattgacgtcgaatcagtgcgcctgagaaaagattggaagcaatggcggaatggcaattccgaaattcccaactggttgggaaaaggatttgctaaactgaaggaatggttccgggacgagctcgattttatagaaaatcttaagaaacttctttggtttcctgagggcgaccaagcaccccgggtttgctaccccatgctgcgaaagaaggacgatcctaatgggaatagcggttacgaagaactcaaaagaggggaattcaagaaagaagatcggcagaagaagctgaccacgccgtggacaccgtgggcaaaacggacagccgacggaagcgagttcgagtcaccaaagaagaagcggaaagtc

SEQ ID NO: 552 - DNA, 4062 bp, synthetic construct
  source 1..4062: mol_type = other DNA
atgaaacggacagccgacggaagcgagttcgagtcaccaaagaagaagcggaaagtcacgactactatgaagatttcaattgaattcctcgagccgtttcggatgaccaaatggcaggaaagcactaggcgaaacaagaacaacaaggaatttgttcgcggccaagcttttgcaagatggcatagaaataagaaggataacacaaaagggcggccttacataactgggacattgctgcggtccgcagtaattagaagcgcggaaaacctgctgacattgagtgatgggaaaattagcgaaaagacatgttgtcctgggaaatttgatacggaagataaagacaggttgctgcaattgaggcagcggtccacccttcgttggaccgataagaacccctgtccagataacgctgaaacttactgcccgttttgcgaacttctcgggagatccggtaacgatggaaagaaggctgagaagaaggattggcgctttcgtattcattttggcaatctttcccttccagggaagcccgatttcgacgggccaaaagctataggcagccaacgggtacttaacagggtcgatttcaaatccggtaaggcccatgacttctttaaggcttacgaagtcgaccatactaggtttccccgcttcgaaggggagattaccatagataataaagtcagcgctgaagccaggaaactgctctgtgattctctcaagtttacggatcggctgtgtggagctctgtgcgtaatcaggttcgatgaatatacaccagcagccgatagtgggaaacaaaccgaaaatgtccaagcagaaccgaatgctaatctcgctgaaaagaccgcagagcaaattattagcattctggacgataataagaaaaccgaaaaaacccgcctgcttgctgatgctattcgttcactccgccgctctagtaaacttgtcgctggcttgccaaaggatcatgacgggaaggatgaccattacctctgggatatcggcaagaagaagaaagacgaaaactctgtcactattaggcaaatccttacgacctcagcagacaccaaggaactcaagaatgccggaaaatggagagaattctgcgagaagctgggtgaagcgctgtacctcaagagtaaagacatgagtggcggcctgaaaattactcggagaatactgggcgatgctgaattccatggaaagcccgatcggcttgaaaagagccggtctgtgtcaatcggatctgtgttgaaagaaactgtggtatgcggcgaactggtcgctaaaacgcccttcttcttcggagcgatagacgaagatgcaaaacaaaccgacctgcaagtactcctcactcccgataacaagtatagactgccaagaagcgccgtgcgaggtatactccgtcgagatcttcaaacctattttgatagcccatgcaatgctgagttgggtggacggccatgcatgtgtaagacgtgtaggattatgagagggatcacggtgatggatgcgcgcagtgagtacaatgccccgccagaaataaggcatcgtacccgcattaatcccttcacaggcacggttgcggaaggtgccctgtttaatatggaagtagcccccgaggggattgtctttccatttcaactccggtaccggggctctgaagatgggctgcccgatgcactgaaaacggtgttgaaatggtgggctgaggggcaggcattcatgagtggcgctgcctcaaccgggaagggccgattccggatggaaaatgctaaatatgaaacgctggatctgagcgacgagaatcaaaggaatgactatcttaagaattggggatggcgtgacgagaaggggctcgaggaactgaagaaacgactgaactcaggtctgccagagcccggtaattatagggatccaaaatggcacgagattaacgtttccattgagatggcaagcccttttattaatggcgacccaatccgcgcagccgtggacaaacgtggtacagatgtggttaccttcgttaagtataaagctgaaggggaagaggcgaaacccgtatgtgcatacaaggccgaatcttttagaggggtgatcagaagtgccgtggcacgcattcatatggaagatggcgtccctttgactgagttgactcacagtgactgtgaatgtctcctgtgccaaatctttggaagtgagtatgaagccggcaaaataaggtttgaagatctcgtattcgaaagtgacccggaacctgtgaccttcgatcatgtggccatcgatagattcactggcggtgcagctgataagaagaaattcgatgattcccctctgcccggtagccctgcaagaccgctcatgttgaaaggctccttctggatccgcagggacgttctcgaggacgaagagtactgtaaggcactcggtaaggctcttgcagatgtgaataatggcctttatcccctcggtggaaagagcgccatcggctacggacaggtcaagagtctgggtataaagggagatgataagaggatttctcgcctcatgaatcctgcctttgatgagacagatgtagccgttccagaaaagcccaaaactgatgccgaggttcgcatcgaggcagagaaagtatattacccacactatttcgtcgaaccccataagaaggtggaacgcgaggagaaaccctgtggtcatcaaaagttccacgaggggcgactgacaggtaaaattcggtgtaagctcattaccaagacacccctcatcgtcccagatactagtaatgacgatttcttcagacctgcggataaagaagctcggaaggaaaaggacgaatatcataaatcatatgctttcttcagacttcataaacaaatcatgattcccgggagcgaattgagaggaatggtgagtagtgtctacgaaactgtgacaaattcttgcttcaggatatttgatgagactaaacggttgtcatggcggatggatgctgatcaccagaatgtgctgcaagactttctcccaggtcgagtgaccgccgatgggaaacatatacaaaagttttccgggggtgggtcacgaactgtagacgataggatgatcggcaaacgtatgagcgccgatctgcggccgtgccatggagattgggtggaagatggtgatctcagtgccttgaatgcatatcccgagaaaagactcctcttgcgccaccccaaaggactctgccctgcttgccggctctttggaaccggatcttacaagggcagagtcaggtttggattcgcgtcactcgaaaacgatccggagtggctgatcccaggcaagaatcccggcgatccgtttcacggcgggccggtgatgctctcattgttggaacggcctcgcccgacttggagtataccgggatccgacaataagtttaaagtgcctggcagaaagttttacgtccaccaccacgcctggaaaaccattaaggacgggaaccatcccacaacaggcaaagctattgaacaaagccctaataaccgcactgtagaagctctcgccggcgggaattcctttagcttcgaaattgcctttgagaacctgaaagaatgggagctgggtttgctcatccacagcctgcaactcgaaaagggtctggcgcataaacttggaatggcaaagtctatgggatttggttcagttgaaattgacgtcgaatcagtgcgcctgagaaaagattggaagcaatggcggaatggcaattccgaaattcccaactggttgggaaaaggatttgctaaactgaaggaatggttccgggacgagctcgattttatagaaaatcttaagaaacttctttggtttcctgagggcgaccaagcaccccgggtttgctaccccatgctgcgaaagaaggacgatcctaatgggaatagcggttacgaagaactcaaaagaggggaattcaagaaagaagatcggcagaagaagctgaccacgccgtggacaccgtgggcaaaacggacagccgacggaagcgagttcgagtcaccaaagaagaagcggaaagtc

SEQ ID NO: 553 - DNA, 4062 bp, synthetic construct
  source 1..4062: mol_type = other DNA
atgaaacggacagccgacggaagcgagttcgagtcaccaaagaagaagcggaaagtcacgactactatgaagatttcaattgaattcctcgagccgtttcggatgaccaaatggcaggaaagcactaggcgaaacaagaacaacaaggaatttgttcgcggccaagcttttgcaagatggcatagaaataagaaggataacacaaaagggcggccttacataactgggacattgctgcggtccgcagtaattagaagcgcggaaaacctgctgacattgagtgatgggaaaattagcgaaaagacatgttgtcctgggaaatttgatacggaagataaagacaggttgctgcaattgaggcagcggtccacccttcgttggaccgataagaacccctgtccagataacgctgaaacttactgcccgttttgcgaacttctcgggagatccggtaacgatggaaagaaggctgagaagaaggattggcgctttcgtattcattttggcaatctttcccttccagggaagcccgatttcgacgggccaaaagctataggcagccaacgggtacttaacagggtcgatttcaaatccggtaaggcccatgacttctttaaggcttacgaagtcgaccatactaggtttccccgcttcgaaggggagattaccatagataataaagtcagcgctgaagccaggaaactgctctgtgattctctcaagtttacggatcggctgtgtggagctctgtgcgtaatcaggttcgatgaatatacaccagcagccgatagtgggaaacaaaccgaaaatgtccaagcagaaccgaatgctaatctcgctgaaaagaccgcagagcaaattattagcattctggacgataataagaaaaccaggtatacccgcctgcttgctgatgctattcgttcactccgccgctctagtaaacttgtcgctggcttgccaaaggatcatgacgggaaggatgaccattacctctgggatatcggcaagaagaagaaagacgaaaactctgtcactattaggcaaatccttacgacctcagcagacaccaaggaactcaagaatgccggaaaatggagagaattctgcgagaagctgggtgaagcgctgtacctcaagagtaaagacatgagtggcggcctgaaaattactcggagaatactgggcgatgctgaattccatggaaagcccgatcggcttgaaaagagccggtctgtgtcaatcggatctgtgttgaaagaaactgtggtatgcggcgaactggtcgctaaaacgcccttcttcttcggagcgatagacgaagatgcaaaacaaaccgacctgcaagtactcctcactcccgataacaagtatagactgccaagaagcgccgtgcgaggtatactccgtcgagatcttcaaacctattttgatagcccatgcaatgctgagttgggtggacggccatgcatgtgtaagacgtgtaggattatgagagggatcacggtgatggatgcgcgcagtgagtacaatgccccgccagaaataaggcatcgtacccgcattaatcccttcacaggcacggttgcggaaggtgccctgtttaatatggaagtagcccccgaggggattgtctttccatttcaactccggtaccggggctctgaagatgggctgcccgatgcactgaaaacggtgttgaaatggtgggctgaggggcaggcattcatgagtggcgctgcctcaaccgggaagggccgattccggatggaaaatgctaaatatgaaacgctggatctgagcgacgagaatcaaaggaatgactatcttaagaattggggatggcgtgacgagaaggggctcgaggaactgaagaaacgactgaactcaggtctgccagagcccggtaattatagggatccaaaatggcacgagattaacgtttccattgagatggcaagcccttttattaatggcgacccaatccgcgcagccgtggacaaacgtggtacagatgtggttaccttcgttaagtataaagctgaaggggaagaggcgaaacccgtatgtgcatacaaggccgaatcttttagaggggtgatcagaagtgccgtggcacgcattcatatggaagatggcgtccctttgactgagttgactcacagtgactgtgaatgtctcctgtgccaaatctttggaagtgagtatgaagccggcaaaataaggtttgaagatctcgtattcgaaagtgacccggaacctgtgaccttcgatcatgtggccatcgatagattcactggcggtgcagctgataagaagaaattcgatgattcccctctgcccggtagccctgcaagaccgctcatgttgaaaggctccttctggatccgcagggacgttctcgaggacgaagagtactgtaaggcactcggtaaggctcttgcagatgtgaataatggcctttatcccctcggtggaaagagcgccatcggctacggacaggtcaagagtctgggtataaagggagatgataagaggatttctcgcctcatgaatcctgcctttgatgagacagatgtagccgttccagaaaagcccaaaactgatgccgaggttcgcatcgaggcagagaaagtatattacccacactatttcgtcgaaccccataagaaggtggaacgcgaggagaaaccctgtggtcatcaaaagttccacgaggggcgactgacaggtaaaattcggtgtaagctcattaccaagacacccctcatcgtcccagatactagtaatgacgatttcttcagacctgcggataaagaagctcggaaggaaaaggacgaatatcataaatcatatgctttcttcagacttcataaacaaatcatgattcccgggagcgaattgagaggaatggtgagtagtgtctacgaaactgtgacaaattcttgcttcaggatatttgatgagactaaacggttgtcatggcggatggatgctgatcaccagaatgtgctgcaagactttctcccaggtcgagtgaccgccgatgggaaacatatacaaaagttttccgggggtgggtcacgaactgtagacgataggatgatcggcaaacgtatgagcgccgatctgcggccgtgccatggagattgggtggaagatggtgatctcagtgccttgaatgcatatcccgagaaaagactcctcttgcgccaccccaaaggactctgccctgcttgccggctctttggaaccggatcttacaagggcagagtcaggtttggattcgcgtcactcgaaaacgatccggagtggctgatcccaggcaagaatcccggcgatccgtttcacggcgggccggtgatgctctcattgttggaacggcctcgcccgacttggagtataccgggatccgacaataagtttaaagtgcctggcagaaagttttacgtccaccaccacgcctggaaaaccattaaggacgggaaccatcccacaacaggcaaagctattgaacaaagccctaataaccgcactgtagaagctctcgccggcgggaattcctttagcttcgaaattgcctttgagaacctgaaagaatgggagctgggtttgctcatccacagcctgcaactcgaaaagggtctggcgcataaacttggaatggcaaagtctatgggatttggttcagttgaaattgacgtcgaatcagtgcgcctgagaaaagattggaagcaatggcggaatggcaattccgaaattcccaactggttgggaaaaggatttgctaaactgaaggaatggttccgggacgagctcgattttatagaaaatcttaagaaacttctttggtttcctgagggcgaccaagcaccccgggtttgctaccccatgctgcgaaagaaggacgatcctaatgggaatagcggttacgaagaactcaaaagaggggaattcaagaaagaagatcggcagaagaagctgaccacgccgtggacaccgtgggcaaaacggacagccgacggaagcgagttcgagtcaccaaagaagaagcggaaagtc

SEQ ID NO: 554 - DNA, 4062 bp, synthetic construct
  source 1..4062: mol_type = other DNA
atgaaacggacagccgacggaagcgagttcgagtcaccaaagaagaagcggaaagtcacgactactatgaagatttcaattgaattcctcgagccgtttcggatgaccaaatggcaggaaagcactaggcgaaacaagaacaacaaggaatttgttcgcggccaagcttttgcaagatggcatagaaataagaaggataacacaaaagggcggccttacataactgggacattgctgcggtccgcagtaattagaagcgcggaaaacctgctgacattgagtgatgggaaaattagcgaaaagacatgttgtcctgggaaatttgatacggaagataaagacaggttgctgcaattgaggcagcggtccacccttcgttggaccgataagaacccctgtccagataacgctgaaacttactgcccgttttgcgaacttctcgggagatccggtaacgatggaaagaaggctgagaagaaggattggcgctttcgtattcattttggcaatctttcccttccagggaagcccgatttcgacgggccaaaagctataggcagccaacgggtacttaacagggtcgatttcaaatccggtaaggcccatgacttctttaaggcttacgaagtcgaccatactaggtttccccgcttcgaaggggagattaccatagataataaagtcagcgctgaagccaggaaactgctctgtgattctctcaagtttacggatcggctgtgtggagctctgtgcgtaatcaggttcgatgaatatacaccagcagccgatagtgggaaacaaaccgaaaatgtccaagcagaaccgaatgctaatctcgctgaaaagaccgcagagcaaattattagcattctggacgataataagaaaaccgaatatacccgcctgcttgctgatgctattcgttcactccgccgctctagtaaacttgtcgctggcttgccaaaggatcatgacgggaaggatgaccattacctctgggatatcggcaagaagaagaaagacgaaaactctgtcactattaggcaaatccttacgacctcagcagacaccaaggaactcaagaatgccggaaaatggagagaattctgcgagaagctgggtgaagcgctgtacctcaagagtaaagacatgagtggcggcctgaaaattactcggagaatactgggcgatgctgaattccatggaaagcccgatcggcttgaaaagagccggtctgtgtcaatcggatctgtgttgaaagaaactgtggtatgcggcgaactggtcgctaaaacgcccttcttcttcggagcgatagacgaagatgcaaaacaaaccgacctgcaagtactcctcactcccgataacaagtatagactgccaagaagcgccgtgcgaggtatactccgtcgagatcttcaaacctattttgatagcccatgcaatgctgagttgggtggacggccatgcatgtgtaagacgtgtaggattatgagagggatcacggtgatggatgcgcgcagtgagtacaatgccccgccagaaataaggcatcgtacccgcattaatcccttcacaggcacggttgcggaaggtgccctgtttaatatggaagtagcccccgaggggattgtctttccatttcaactccggtaccggggctctgaagatgggctgcccgatgcactgaaaacggtgttgaaatggtgggctgaggggcaggcattcatgagtggcgctgcctcaaccgggaagggccgattccggatggaaaatgctaaatatgaaacgctggatctgagcgacgagaatcaaaggaatgactatcttaagaattggggatggcgtgacgagaaggggctcgaggaactgaagaaacgactgaactcaggtctgccagagcccggtaattatagggatccaaaatggcacgagattaacgtttccattgagatggcaagcccttttattaatggcgacccaatccgcgcagccgtggacaaacgtggtacagatgtggttaccttcgttaagtataaagctgaaggggaagaggcgaaacccgtatgtgcatacaaggccgaatcttttagaggggtgatcagaagtgccgtggcacgcattcatatggaagatggcgtccctttgactgagttgactcacagtgactgtgaatgtctcctgtgccaaatctttggaagtgagtatgaagccggcaaaataaggtttgaagatctcgtattcgaaagtgacccggaacctgtgaccttcgatcatgtggccatcgatagattcactggcggtgcagctgataagaagaaattcgatgattcccctctgcccggtagccctgcaagaccgctcatgttgaaaggctccttctggatccgcagggacgttctcgaggacgaagagtactgtaaggcactcggtaaggctcttgcagatgtgaataatggcctttatcccctcggtggaaagagcgccatcggctacggacaggtcaagagtctgggtataaagggagatgataagaggatttctcgcctcatgaatcctgcctttgatgagacagatgtagccgttccagaaaagcccaaaactgatgccgaggttcgcatcgaggcagagaaagtatattacccacactatttcgtcgaaccccataagaaggtggaacgcgaggagaaaccctgtggtcatcaaaagttccacgaggggcgactgacaggtaaaattcggtgtaagctcattaccaagacacccctcatcgtcccagatactagtaatgacgatttcttcagacctgcggataaagaagctcggaaggaaaaggacgaatatcataaatcatatgctttcttcagacttcataaacaaatcatgattcccgggagcgaattgagaggaatggtgagtagtgtctacgaaactgtgacaaattcttgcttcaggatatttgatgagactaaacggttgtcatggcggatggatgctgatcaccagaatgtgctgcaaaagtttctcccaggtcgagtgaccgccgatgggaaacatatacaaaagttttccgggggtgggtcacgaactgtagacgataggatgatcggcaaacgtatgagcgccgatctgcggccgtgccatggagattgggtggaagatggtgatctcagtgccttgaatgcatatcccgagaaaagactcctcttgcgccaccccaaaggactctgccctgcttgccggctctttggaaccggatcttacaagggcagagtcaggtttggattcgcgtcactcgaaaacgatccggagtggctgatcccaggcaagaatcccggcgatccgtttcacggcgggccggtgatgctctcattgttggaacggcctcgcccgacttggagtataccgggatccgacaataagtttaaagtgcctggcagaaagttttacgtccaccaccacgcctggaaaaccattaaggacgggaaccatcccacaacaggcaaagctattgaacaaagccctaataaccgcactgtagaagctctcgccggcgggaattcctttagcttcgaaattgcctttgagaacctgaaagaatgggagctgggtttgctcatccacagcctgcaactcgaaaagggtctggcgcataaacttggaatggcaaagtctatgggatttggttcagttgaaattgacgtcgaatcagtgcgcctgagaaaagattggaagcaatggcggaatggcaattccgaaattcccaactggttgggaaaaggatttgctaaactgaaggaatggttccgggacgagctcgattttatagaaaatcttaagaaacttctttggtttcctgagggcgaccaagcaccccgggtttgctaccccatgctgcgaaagaaggacgatcctaatgggaatagcggttacgaagaactcaaaagaggggaattcaagaaagaagatcggcagaagaagctgaccacgccgtggacaccgtgggcaaaacggacagccgacggaagcgagttcgagtcaccaaagaagaagcggaaagtc

SEQ ID NO: 555 - DNA, 4062 bp, synthetic construct
  source 1..4062: mol_type = other DNA
atgaaacggacagccgacggaagcgagttcgagtcaccaaagaagaagcggaaagtcacgactactatgaagatttcaattgaattcctcgagccgtttcggatgaccaaatggcaggaaagcactaggcgaaacaagaacaacaaggaatttgttcgcggccaagcttttgcaagatggcatagaaataagaaggataacacaaaagggcggccttacataactgggacattgctgcggtccgcagtaattagaagcgcggaaaacctgctgacattgagtgatgggaaaattagcgaaaagacatgttgtcctgggaaatttgatacggaagataaagacaggttgctgcaattgaggcagcggtccacccttcgttggaccgataagaacccctgtccagataacgctgaaacttactgcccgttttgcgaacttctcgggagatccggtaacgatggaaagaaggctgagaagaaggattggcgctttcgtattcattttggcaatctttcccttccagggaagcccgatttcgacgggccaaaagctataggcagccaacgggtacttaacagggtcgatttcaaatccggtaaggcccatgacttctttaaggcttacgaagtcgaccatactaggtttccccgcttcgaaggggagattaccatagataataaagtcagcgctgaagccaggaaactgctctgtgattctctcaagtttacggatcggctgtgtggagctctgtgcgtaatcaggttcgatgaatatacaccagcagccgatagtgggaaacaaaccgaaaatgtccaagcagaaccgaatgctaatctcgctgaaaagaccgcagagcaaattattagcattctggacgataataagaaaaccgaatatacccgcctgcttgctgatgctattcgttcactccgccgctctagtaaacttgtcgctggcttgccaaaggatcatgacgggaaggatgaccattacctctgggatatcggcaagaagaagaaagacgaaaactctgtcactattaggcaaatccttacgacctcagcagacaccaaggaactcaagaatgccggaaaatggagagaattctgcgagaagctgggtgaagcgctgtacctcaagagtaaagacatgagtggcggcctgaaaattactcggagaatactgggcgatgctgaattccatggaaagcccgatcggcttgaaaagagccggtctgtgtcaatcggatctgtgttgaaagaaactgtggtatgcggcgaactggtcgctaaaacgcccttcttcttcggagcgatagacgaagatgcaaaacaaaccgacctgcaagtactcctcactcccgataacaagtatagactgccaagaagcgccgtgcgaggtatactccgtcgagatcttcaaacctattttgatagcccatgcaatgctgagttgggtggacggccatgcatgtgtaagacgtgtaggattatgagagggatcacggtgatggatgcgcgcagtgagtacaatgccccgccagaaataaggcatcgtacccgcattaatcccttcacaggcacggttgcggaaggtgccctgtttaatatggaagtagcccccgaggggattgtctttccatttcaactccggtaccggggctctgaagatgggctgcccgatgcactgaaaacggtgttgaaatggtgggctgaggggcaggcattcatgagtggcgctgcctcaaccgggaagggccgattccggatggaaaatgctaaatatgaaacgctggatctgagcgacgagaatcaaaggaatgactatcttaagaattggggatggcgtgacgagaaggggctcgaggaactgaagaaacgactgaactcaggtctgccagagcccggtaattatagggatccaaaatggcacgagattaacgtttccattgagatggcaagcccttttattaatggcgacccaatccgcgcagccgtggacaaacgtggtacagatgtggttaccttcgttaagtataaagctgaaggggaagaggcgaaacccgtatgtgcatacaaggccgaatcttttagaggggtgatcagaagtgccgtggcacgcattcatatggaagatggcgtccctttgactgagttgactcacagtgactgtgaatgtctcctgtgccaaatctttggaagtgagtatgaagccggcaaaataaggtttgaagatctcgtattcgaaagtgacccggaacctgtgaccttcgatcatgtggccatcgatagattcactggcggtgcagctgataagaagaaattcgatgattcccctctgcccggtagccctgcaagaccgctcatgttgaaaggctccttctggatccgcagggacgttctcgaggacgaagagtactgtaaggcactcggtaaggctcttgcagatgtgaataatggcctttatcccctcggtggaaagagcgccatcggctacggacaggtcaagagtctgggtataaagggagatgataagaggatttctcgcctcatgaatcctgcctttgatgagacagatgtagccgttccagaaaagcccaaaactgatgccgaggttcgcatcgaggcagagaaagtatattacccacactatttcgtcgaaccccataagaaggtggaacgcgaggagaaaccctgtggtcatcaaaagttccacgaggggcgactgacaggtaaaattcggtgtaagctcattaccaagacacccctcatcgtcccagatactagtaatgacgatttcttcagacctgcggataaagaagctcggaaggaaaaggacgaatatcataaatcatatgctttcttcagacttcataaacaaatcatgattcccgggagcgaattgagaggaatggtgagtagtgtctacgaaactgtgacaaattcttgcttcaggatatttgatgagactaaacggttgtcatggcggatggatgctaagcaccagaatgtgctgcaaaagtttctcccaggtcgagtgaccgccgatgggaaacatatacaaaagttttccgggggtgggtcacgaactgtagacgataggatgatcggcaaacgtatgagcgccgatctgcggccgtgccatggagattgggtggaagatggtgatctcagtgccttgaatgcatatcccgagaaaagactcctcttgcgccaccccaaaggactctgccctgcttgccggctctttggaaccggatcttacaagggcagagtcaggtttggattcgcgtcactcgaaaacgatccggagtggctgatcccaggcaagaatcccggcgatccgtttcacggcgggccggtgatgctctcattgttggaacggcctcgcccgacttggagtataccgggatccgacaataagtttaaagtgcctggcagaaagttttacgtccaccaccacgcctggaaaaccattaaggacgggaaccatcccacaacaggcaaagctattgaacaaagccctaataaccgcactgtagaagctctcgccggcgggaattcctttagcttcgaaattgcctttgagaacctgaaagaatgggagctgggtttgctcatccacagcctgcaactcgaaaagggtctggcgcataaacttggaatggcaaagtctatgggatttggttcagttgaaattgacgtcgaatcagtgcgcctgagaaaagattggaagcaatggcggaatggcaattccgaaattcccaactggttgggaaaaggatttgctaaactgaaggaatggttccgggacgagctcgattttatagaaaatcttaagaaacttctttggtttcctgagggcgaccaagcaccccgggtttgctaccccatgctgcgaaagaaggacgatcctaatgggaatagcggttacgaagaactcaaaagaggggaattcaagaaagaagatcggcagaagaagctgaccacgccgtggacaccgtgggcaaaacggacagccgacggaagcgagttcgagtcaccaaagaagaagcggaaagtc

SEQ ID NO: 556 - DNA, 4062 bp, synthetic construct
  source 1..4062: mol_type = other DNA
atgaaacggacagccgacggaagcgagttcgagtcaccaaagaagaagcggaaagtcacgactactatgaagatttcaattgaattcctcgagccgtttcggatgaccaaatggcaggaaagcactaggcgaaacaagaacaacaaggaatttgttcgcggccaagcttttgcaagatggcatagaaataagaaggataacacaaaagggcggccttacataactgggacattgctgcggtccgcagtaattagaagcgcggaaaacctgctgacattgagtgatgggaaaattagcgaaaagacatgttgtcctgggaaatttgatacggaagataaagacaggttgctgcaattgaggcagcggtccacccttcgttggaccgataagaacccctgtccagataacgctgaaacttactgcccgttttgcgaacttctcgggagatccggtaacgatggaaagaaggctgagaagaaggattggcgctttcgtattcattttggcaatctttcccttccagggaagcccgatttcgacgggccaaaagctataggcagccaacgggtacttaacagggtcgatttcaaatccggtaaggcccatgacttctttaaggcttacgaagtcgaccatactaggtttccccgcttcgaaggggagattaccatagataataaagtcagcgctgaagccaggaaactgctctgtgattctctcaagtttacggatcggctgtgtggagctctgtgcgtaatcaggttcgatgaatatacaccagcagccgatagtgggaaacaaaccgaaaatgtccaagcagaaccgaatgctaatctcgctgaaaagaccgcagagcaaattattagcattctggacgataataagaaaaccgaatatacccgcctgcttgctgatgctattcgttcactccgccgctctagtaaacttgtcgctggcttgccaaaggatcatgacgggaaggatgaccataagctctgggatatcggcaagaagaagaaagacgaaaactctgtcactattaggcaaatccttacgacctcagcagacaccaaggaactcaagaatgccggaaaatggagagaattctgcgagaagctgggtgaagcgctgtacctcaagagtaaagacatgagtggcggcctgaaaattactcggagaatactgggcgatgctgaattccatggaaagcccgatcggcttgaaaagagccggtctgtgtcaatcggatctgtgttgaaagaaactgtggtatgcggcgaactggtcgctaaaacgcccttcttcttcggagcgatagacgaagatgcaaaacaaaccgacctgcaagtactcctcactcccgataacaagtatagactgccaagaagcgccgtgcgaggtatactccgtcgagatcttcaaacctattttgatagcccatgcaatgctgagttgggtggacggccatgcatgtgtaagacgtgtaggattatgagagggatcacggtgatggatgcgcgcagtgagtacaatgccccgccagaaataaggcatcgtacccgcattaatcccttcacaggcacggttgcggaaggtgccctgtttaatatggaagtagcccccgaggggattgtctttccatttcaactccggtaccggggctctgaagatgggctgcccgatgcactgaaaacggtgttgaaatggtgggctgaggggcaggcattcatgagtggcgctgcctcaaccgggaagggccgattccggatggaaaatgctaaatatgaaacgctggatctgagcgacgagaatcaaaggaatgactatcttaagaattggggatggcgtgacgagaaggggctcgaggaactgaagaaacgactgaactcaggtctgccagagcccggtaattatagggatccaaaatggcacgagattaacgtttccattgagatggcaagcccttttattaatggcgacccaatccgcgcagccgtggacaaacgtggtacagatgtggttaccttcgttaagtataaagctgaaggggaagaggcgaaacccgtatgtgcatacaaggccgaatcttttagaggggtgatcagaagtgccgtggcacgcattcatatggaagatggcgtccctttgactgagttgactcacagtgactgtgaatgtctcctgtgccaaatctttggaagtgagtatgaagccggcaaaataaggtttgaagatctcgtattcgaaagtgacccggaacctgtgaccttcgatcatgtggccatcgatagattcactggcggtgcagctgataagaagaaattcgatgattcccctctgcccggtagccctgcaagaccgctcatgttgaaaggctccttctggatccgcagggacgttctcgaggacgaagagtactgtaaggcactcggtaaggctcttgcagatgtgaataatggcctttatcccctcggtggaaagagcgccatcggctacggacaggtcaagagtctgggtataaagggagatgataagaggatttctcgcctcatgaatcctgcctttgatgagacagatgtagccgttccagaaaagcccaaaactgatgccgaggttcgcatcgaggcagagaaagtatattacccacactatttcgtcgaaccccataagaaggtggaacgcgaggagaaaccctgtggtcatcaaaagttccacgaggggcgactgacaggtaaaattcggtgtaagctcattaccaagacacccctcatcgtcccagatactagtaatgacgatttcttcagacctgcggataaagaagctcggaaggaaaaggacgaatatcataaatcatatgctttcttcagacttcataaacaaatcatgattcccgggagcgaattgagaggaatggtgagtagtgtctacgaaactgtgacaaattcttgcttcaggatatttgatgagactaaacggttgtcatggcggatggatgctaagcaccagaatgtgctgcaaaagtttctcccaggtcgagtgaccgccgatgggaaacatatacaaaagttttccgggggtgggtcacgaactgtagacgataggatgatcggcaaacgtatgagcgccgatctgcggccgtgccatggagattgggtggaagatggtgatctcagtgccttgaatgcatatcccgagaaaagactcctcttgcgccaccccaaaggactctgccctgcttgccggctctttggaaccggatcttacaagggcagagtcaggtttggattcgcgtcactcgaaaacgatccggagtggctgatcccaggcaagaatcccggcgatccgtttcacggcgggccggtgatgctctcattgttggaacggcctcgcccgacttggagtataccgggatccgacaataagtttaaagtgcctggcagaaagttttacgtccaccaccacgcctggaaaaccattaaggacgggaaccatcccacaacaggcaaagctattgaacaaagccctaataaccgcactgtagaagctctcgccggcgggaattcctttagcttcgaaattgcctttgagaacctgaaagaatgggagctgggtttgctcatccacagcctgcaactcgaaaagggtctggcgcataaacttggaatggcaaagtctatgggatttggttcagttgaaattgacgtcgaatcagtgcgcctgagaaaagattggaagcaatggcggaatggcaattccgaaattcccaactggttgggaaaaggatttgctaaactgaaggaatggttccgggacgagctcgattttatagaaaatcttaagaaacttctttggtttcctgagggcgaccaagcaccccgggtttgctaccccatgctgcgaaagaaggacgatcctaatgggaatagcggttacgaagaactcaaaagaggggaattcaagaaagaagatcggcagaagaagctgaccacgccgtggacaccgtgggcaaaacggacagccgacggaagcgagttcgagtcaccaaagaagaagcggaaagtc

SEQ ID NO: 557 - DNA, 4437 bp, synthetic construct
  source 1..4437: mol_type = other DNA
atgaaacggacagccgacggaagcgagttcgagtcaccaaagaagaagcggaaagtcacgactactatgaagatttcaattgaattcctcgagccgtttcggatgaccaaatggcaggaaagcactaggcgaaacaagaacaacaaggaatttgttcgcggccaagcttttgcaagatggcatagaaataagaaggataacacaaaagggcggccttacataactgggacattgctgcggtccgcagtaattagaagcgcggaaaacctgctgacattgagtgatgggaaaattagcgaaaagacatgttgtcctgggaaatttgatacggaagataaagacaggttgctgcaattgaggcagcggtccacccttcgttggaccgataagaacccctgtccagataacgctgaaacttactgcccgttttgcgaacttctcgggagatccggtaacgatggaaagaaggctgagaagaaggattggcgctttcgtattcattttggcaatctttcccttccagggaagcccgatttcgacgggccaaaagctataggcagccaacgggtacttaacagggtcgatttcaaatccggtaaggcccatgacttctttaaggcttacgaagtcgaccatactaggtttccccgcttcgaaggggagattaccatagataataaagtcagcgctgaagccaggaaactgctctgtgattctctcaagtttacggatcggctgtgtggagctctgtgcgtaatcaggttcgatgaatatacaccagcagccgatagtgggaaacaaaccgaaaatgtccaagcagaaccgaatgctaatctcgctgaaaagaccgcagagcaaattattagcattctggacgataataagaaaaccgaatatacccgcctgcttgctgatgctattcgttcactccgccgctctagtaaacttgtcgctggcttgccaaaggatcatgacgggaaggatgaccattacctctgggatatcggcaagaagaagaaagacgaaaactctgtcactattaggcaaatccttacgacctcagcagacaccaaggaactcaagaatgccggaaaatggagagaattctgcgagaagctgggtgaagcgctgtacctcaagagtaaagacatgagtggcggcctgaaaattactcggagaatactgggcgatgctgaattccatggaaagcccgatcggcttgaaaagagccggtctgtgtcaatcggatctgtgttgaaagaaactgtggtatgcggcgaactggtcgctaaaacgcccttcttcttcggagcgatagacgaagatgcaaaacaaaccgacctgcaagtactcctcactcccgataacaagtatagactgccaagaagcgccgtgcgaggtatactccgtcgagatcttcaaacctattttgatagcccatgcaatgctgagttgggtggacggccatgcatgtgtaagacgtgtaggattatgagagggatcacggtgatggatgcgcgcagtgagtacaatgccccgccagaaataaggcatcgtacccgcattaatcccttcacaggcacggttgcggaaggtgccctgtttaatatggaagtagcccccgaggggattgtctttccatttcaactccggtaccggggctctgaagatgggctgcccgatgcactgaaaacggtgttgaaatggtgggctgaggggcaggcattcatgagtggcgctgcctcaaccgggaagggccgattccggatggaaaatgctaaatatgaaacgctggatctgagcgacgagaatcaaaggaatgactatcttaagaattggggatggcgtgacgagaaggggctcgaggaactgaagaaacgactgaactcaggtctgccagagcccggtaattatagggatccaaaatggcacgagattaacgtttccattgagatggcaagcccttttattaatggcgacccaatccgcgcagccgtggacaaacgtggtacagatgtggttaccttcgttaagtataaagctgaaggggaagaggcgaaacccgtatgtgcatacaaggccgaatcttttagaggggtgatcagaagtgccgtggcacgcattcatatggaagatggcgtccctttgactgagttgactcacagtgactgtgaatgtctcctgtgccaaatctttggaagtgagtatgaagccggcaaaataaggtttgaagatctcgtattcgaaagtgacccggaacctgtgaccttcgatcatgtggccatcgatagattcactggcggtgcagctgataagaagaaattcgatgattcccctctgcccggtagccctgcaagaccgctcatgttgaaaggctccttctggatccgcagggacgttctcgaggacgaagagtactgtaaggcactcggtaaggctcttgcagatgtgaataatggcctttatcccctcggtggaaagagcgccatcggctacggacaggtcaagagtctgggtataaagggagatgataagaggatttctcgcctcatgaatcctgcctttgatgagacagatgtagccgttccagaaaagcccaaaactgatgccgaggttcgcatcgaggcagagaaagtatattacccacactatttcgtcgaaccccataagaaggtggaacgcgaggagaaaccctgtggtcatcaaaagttccacgaggggcgactgacaggtaaaattcggtgtaagctcattaccaagacacccctcatcgtcccagatactagtaatgacgatttcttcagacctgcggataaagaagctcggaaggaaaaggacgaatatcataaatcatatgctttcttcagacttcataaacaaatcatgattcccgggagcgaattgagaggaatggtgagtagtgtctacgaaactgtgacaaattcttgcttcaggatatttgatgagactaaacggttgtcatggcggatggatgctgatcaccagaatgtgctgcaagactttctcccaggtcgagtgaccgccgatgggaaacatatacaaaagttttccgggggtgggtcacgaactgtagacgataggatgatcggcaaacgtatgagcgccgatctgcggccgtgccatggagattgggtggaagatggtgatctcagtgccttgaatgcatatcccgagaaaagactcctcttgcgccaccccaaaggactctgccctgcttgccggctctttggaaccggatcttacaagggcagagtcaggtttggattcgcgtcactcgaaaacgatccggagtggctgatcccaggcaagaatcccggcgatccgtttcacggcgggccggtgatgctctcattgttggaacggcctcgcccgacttggagtataccgggatccgacaataagtttaaagtgcctggcagaaagttttacgtccaccaccacgcctggaaaaccattaaggacgggaaccatcccacaacaggcaaagctattgaacaaagccctaataaccgcactgtagaagctctcgccggcgggaattcctttagcttcgaaattgcctttgagaacctgaaagaatgggagctgggtttgctcatccacagcctgcaactcgaaaagggtctggcgcataaacttggaatggcaaagtctatgggatttggttcagttgaaattgacgtcgaatcagtgcgcctgagaaaagattggaagcaatggcggaatggcaattccgaaattcccaactggttgggaaaaggatttgctaaactgaaggaatggttccgggacgagctcgattttatagaaaatcttaagaaacttctttggtttcctgagggcgaccaagcaccccgggtttgctaccccatgctgcgaaagaaggacgatcctaatgggaatagcggttacgaagaactcaaagacggggaattcaagaaagaagatcggcagaagaagctgaccacgccgtggacaccgtgggcaatggcgatgcaagcggccaagagggcgaacattcgacttccacctgaagtaaatcggatattgtatataagaaatttgccatacaaaatcacagctgaagaaatgtatgatatatttgggaaatatggacctattcgtcaaatcagagtggggaacacacctgaaactagaggaacagcttatgtggtctatgaggacatctttgatgccaagaatgcatgtgatcacctatcgggattcaatgtttgtaacagataccttgtggttttgtactataatgccaacagggcatttcagaagatggacacaaagaagaaggaggaacagttgaagcttctcaaggagaaatatggcatcaacacagatccaccaaaaaaacggacagccgacggaagcgagttcgagtcaccaaagaagaagcggaaagtc

SEQ ID NO: 558 - DNA, 4782 bp, synthetic construct
  source 1..4782: mol_type = other DNA
atgaaacggacagccgacggaagcgagttcgagtcaccaaagaagaagcggaaagtcacgactactatgaagatttcaattgaattcctcgagccgtttcggatgaccaaatggcaggaaagcactaggcgaaacaagaacaacaaggaatttgttcgcggccaagcttttgcaagatggcatagaaataagaaggataacacaaaagggcggccttacataactgggacattgctgcggtccgcagtaattagaagcgcggaaaacctgctgacattgagtgatgggaaaattagcgaaaagacatgttgtcctgggaaatttgatacggaagataaagacaggttgctgcaattgaggcagcggtccacccttcgttggaccgataagaacccctgtccagataacgctgaaacttactgcccgttttgcgaacttctcgggagatccggtaacgatggaaagaaggctgagaagaaggattggcgctttcgtattcattttggcaatctttcccttccagggaagcccgatttcgacgggccaaaagctataggcagccaacgggtacttaacagggtcgatttcaaatccggtaaggcccatgacttctttaaggcttacgaagtcgaccatactaggtttccccgcttcgaaggggagattaccatagataataaagtcagcgctgaagccaggaaactgctctgtgattctctcaagtttacggatcggctgtgtggagctctgtgcgtaatcaggttcgatgaatatacaccagcagccgatagtgggaaacaaaccgaaaatgtccaagcagaaccgaatgctaatctcgctgaaaagaccgcagagcaaattattagcattctggacgataataagaaaaccgaatatacccgcctgcttgctgatgctattcgttcactccgccgctctagtaaacttgtcgctggcttgccaaaggatcatgacgggaaggatgaccattacctctgggatatcggcaagaagaagaaagacgaaaactctgtcactattaggcaaatccttacgacctcagcagacaccaaggaactcaagaatgccggaaaatggagagaattctgcgagaagctgggtgaagcgctgtacctcaagagtaaagacatgagtggcggcctgaaaattactcggagaatactgggcgatgctgaattccatggaaagcccgatcggcttgaaaagagccggtctgtgtcaatcggatctgtgttgaaagaaactgtggtatgcggcgaactggtcgctaaaacgcccttcttcttcggagcgatagacgaagatgcaaaacaaaccgacctgcaagtactcctcactcccgataacaagtatagactgccaagaagcgccgtgcgaggtatactccgtcgagatcttcaaacctattttgatagcccatgcaatgctgagttgggtggacggccatgcatgtgtaagacgtgtaggattatgagagggatcacggtgatggatgcgcgcagtgagtacaatgccccgccagaaataaggcatcgtacccgcattaatcccttcacaggcacggttgcggaaggtgccctgtttaatatggaagtagcccccgaggggattgtctttccatttcaactccggtaccggggctctgaagatgggctgcccgatgcactgaaaacggtgttgaaatggtgggctgaggggcaggcattcatgagtggcgctgcctcaaccgggaagggccgattccggatggaaaatgctaaatatgaaacgctggatctgagcgacgagaatcaaaggaatgactatcttaagaattggggatggcgtgacgagaaggggctcgaggaactgaagaaacgactgaactcaggtctgccagagcccggtaattatagggatccaaaatggcacgagattaacgtttccattgagatggcaagcccttttattaatggcgacccaatccgcgcagccgtggacaaacgtggtacagatgtggttaccttcgttaagtataaagctgaaggggaagaggcgaaacccgtatgtgcatacaaggccgaatcttttagaggggtgatcagaagtgccgtggcacgcattcatatggaagatggcgtccctttgactgagttgactcacagtgactgtgaatgtctcctgtgccaaatctttggaagtgagtatgaagccggcaaaataaggtttgaagatctcgtattcgaaagtgacccggaacctgtgaccttcgatcatgtggccatcgatagattcactggcggtgcagctgataagaagaaattcgatgattcccctctgcccggtagccctgcaagaccgctcatgttgaaaggctccttctggatccgcagggacgttctcgaggacgaagagtactgtaaggcactcggtaaggctcttgcagatgtgaataatggcctttatcccctcggtggaaagagcgccatcggctacggacaggtcaagagtctgggtataaagggagatgataagaggatttctcgcctcatgaatcctgcctttgatgagacagatgtagccgttccagaaaagcccaaaactgatgccgaggttcgcatcgaggcagagaaagtatattacccacactatttcgtcgaaccccataagaaggtggaacgcgaggagaaaccctgtggtcatcaaaagttccacgaggggcgactgacaggtaaaattcggtgtaagctcattaccaagacacccctcatcgtcccagatactagtaatgacgatttcttcagacctgcggataaagaagctcggaaggaaaaggacgaatatcataaatcatatgctttcttcagacttcataaacaaatcatgattcccgggagcgaattgagaggaatggtgagtagtgtctacgaaactgtgacaaattcttgcttcaggatatttgatgagactaaacggttgtcatggcggatggatgctgatcaccagaatgtgctgcaagactttctcccaggtcgagtgaccgccgatgggaaacatatacaaaagttttccgggggtgggtcacgaactgtagacgataggatgatcggcaaacgtatgagcgccgatctgcggccgtgccatggagattgggtggaagatggtgatctcagtgccttgaatgcatatcccgagaaaagactcctcttgcgccaccccaaaggactctgccctgcttgccggctctttggaaccggatcttacaagggcagagtcaggtttggattcgcgtcactcgaaaacgatccggagtggctgatcccaggcaagaatcccggcgatccgtttcacggcgggccggtgatgctctcattgttggaacggcctcgcccgacttggagtataccgggatccgacaataagtttaaagtgcctggcagaaagttttacgtccaccaccacgcctggaaaaccattaaggacgggaaccatcccacaacaggcaaagctattgaacaaagccctaataaccgcactgtagaagctctcgccggcgggaattcctttagcttcgaaattgcctttgagaacctgaaagaatgggagctgggtttgctcatccacagcctgcaactcgaaaagggtctggcgcataaacttggaatggcaaagtctatgggatttggttcagttgaaattgacgtcgaatcagtgcgcctgagaaaagattggaagcaatggcggaatggcaattccgaaattcccaactggttgggaaaaggatttgctaaactgaaggaatggttccgggacgagctcgattttatagaaaatcttaagaaacttctttggtttcctgagggcgaccaagcaccccgggtttgctaccccatgctgcgaaagaaggacgatcctaatgggaatagcggttacgaagaactcaaagacggggaattcaagaaagaagatcggcagaagaagctgaccacgccgtggacaccgtgggcaatggcggagtatctggcctccatcttcggcaccgagaaagacaaagtcaactgttcattttatttcaaaattggagcatgtcgtcatggagacaggtgctctcggttgcacaataaaccgacgtttagccagaccattgccctcttgaacatttaccgtaaccctcaaaactcttcccagtctgctgacggtttgcgctgtgccgtgagcgatgtggagatgcaggaacactatgatgagttttttgaggaggtttttacagaaatggaggagaagtatggggaagtagaggagatgaacgtctgtgacaacctgggagaccacctggtggggaacgtgtacgtcaagtttcgccgtgaggaagatgcggaaaaggctgtgattgacttgaataaccgttggtttaatggacagccgctccacgccgagctgtcacccgtgacggacttcagagaagcctgctgccgtcagtatgagatgggagaatgcacacgaggcggcttctgcaacttcatgcatttgaagcccatttccagagagctgcggcgggagctgtatggccgccgtcgcaagaagcatagatcaagatcccgatcccgggagcgtcgttctcggtctagagaccgtggtcgtggcggtggcggtggcggtggtggaggtggcggcggacgggagcgtgacaggaggcggtcgagagatcgtgaaagatctgggcgattcaaacggacagccgacggaagcgagttcgagtcaccaaagaagaagcggaaagtc

SEQ ID NO: 559 - DNA, 5265 bp, synthetic construct
  source 1..5265: mol_type = other DNA
atgaaacggacagccgacggaagcgagttcgagtcaccaaagaagaagcggaaagtcacgactactatgaagatttcaattgaattcctcgagccgtttcggatgaccaaatggcaggaaagcactaggcgaaacaagaacaacaaggaatttgttcgcggccaagcttttgcaagatggcatagaaataagaaggataacacaaaagggcggccttacataactgggacattgctgcggtccgcagtaattagaagcgcggaaaacctgctgacattgagtgatgggaaaattagcgaaaagacatgttgtcctgggaaatttgatacggaagataaagacaggttgctgcaattgaggcagcggtccacccttcgttggaccgataagaacccctgtccagataacgctgaaacttactgcccgttttgcgaacttctcgggagatccggtaacgatggaaagaaggctgagaagaaggattggcgctttcgtattcattttggcaatctttcccttccagggaagcccgatttcgacgggccaaaagctataggcagccaacgggtacttaacagggtcgatttcaaatccggtaaggcccatgacttctttaaggcttacgaagtcgaccatactaggtttccccgcttcgaaggggagattaccatagataataaagtcagcgctgaagccaggaaactgctctgtgattctctcaagtttacggatcggctgtgtggagctctgtgcgtaatcaggttcgatgaatatacaccagcagccgatagtgggaaacaaaccgaaaatgtccaagcagaaccgaatgctaatctcgctgaaaagaccgcagagcaaattattagcattctggacgataataagaaaaccgaatatacccgcctgcttgctgatgctattcgttcactccgccgctctagtaaacttgtcgctggcttgccaaaggatcatgacgggaaggatgaccattacctctgggatatcggcaagaagaagaaagacgaaaactctgtcactattaggcaaatccttacgacctcagcagacaccaaggaactcaagaatgccggaaaatggagagaattctgcgagaagctgggtgaagcgctgtacctcaagagtaaagacatgagtggcggcctgaaaattactcggagaatactgggcgatgctgaattccatggaaagcccgatcggcttgaaaagagccggtctgtgtcaatcggatctgtgttgaaagaaactgtggtatgcggcgaactggtcgctaaaacgcccttcttcttcggagcgatagacgaagatgcaaaacaaaccgacctgcaagtactcctcactcccgataacaagtatagactgccaagaagcgccgtgcgaggtatactccgtcgagatcttcaaacctattttgatagcccatgcaatgctgagttgggtggacggccatgcatgtgtaagacgtgtaggattatgagagggatcacggtgatggatgcgcgcagtgagtacaatgccccgccagaaataaggcatcgtacccgcattaatcccttcacaggcacggttgcggaaggtgccctgtttaatatggaagtagcccccgaggggattgtctttccatttcaactccggtaccggggctctgaagatgggctgcccgatgcactgaaaacggtgttgaaatggtgggctgaggggcaggcattcatgagtggcgctgcctcaaccgggaagggccgattccggatggaaaatgctaaatatgaaacgctggatctgagcgacgagaatcaaaggaatgactatcttaagaattggggatggcgtgacgagaaggggctcgaggaactgaagaaacgactgaactcaggtctgccagagcccggtaattatagggatccaaaatggcacgagattaacgtttccattgagatggcaagcccttttattaatggcgacccaatccgcgcagccgtggacaaacgtggtacagatgtggttaccttcgttaagtataaagctgaaggggaagaggcgaaacccgtatgtgcatacaaggccgaatcttttagaggggtgatcagaagtgccgtggcacgcattcatatggaagatggcgtccctttgactgagttgactcacagtgactgtgaatgtctcctgtgccaaatctttggaagtgagtatgaagccggcaaaataaggtttgaagatctcgtattcgaaagtgacccggaacctgtgaccttcgatcatgtggccatcgatagattcactggcggtgcagctgataagaagaaattcgatgattcccctctgcccggtagccctgcaagaccgctcatgttgaaaggctccttctggatccgcagggacgttctcgaggacgaagagtactgtaaggcactcggtaaggctcttgcagatgtgaataatggcctttatcccctcggtggaaagagcgccatcggctacggacaggtcaagagtctgggtataaagggagatgataagaggatttctcgcctcatgaatcctgcctttgatgagacagatgtagccgttccagaaaagcccaaaactgatgccgaggttcgcatcgaggcagagaaagtatattacccacactatttcgtcgaaccccataagaaggtggaacgcgaggagaaaccctgtggtcatcaaaagttccacgaggggcgactgacaggtaaaattcggtgtaagctcattaccaagacacccctcatcgtcccagatactagtaatgacgatttcttcagacctgcggataaagaagctcggaaggaaaaggacgaatatcataaatcatatgctttcttcagacttcataaacaaatcatgattcccgggagcgaattgagaggaatggtgagtagtgtctacgaaactgtgacaaattcttgcttcaggatatttgatgagactaaacggttgtcatggcggatggatgctgatcaccagaatgtgctgcaagactttctcccaggtcgagtgaccgccgatgggaaacatatacaaaagttttccgggggtgggtcacgaactgtagacgataggatgatcggcaaacgtatgagcgccgatctgcggccgtgccatggagattgggtggaagatggtgatctcagtgccttgaatgcatatcccgagaaaagactcctcttgcgccaccccaaaggactctgccctgcttgccggctctttggaaccggatcttacaagggcagagtcaggtttggattcgcgtcactcgaaaacgatccggagtggctgatcccaggcaagaatcccggcgatccgtttcacggcgggccggtgatgctctcattgttggaacggcctcgcccgacttggagtataccgggatccgacaataagtttaaagtgcctggcagaaagttttacgtccaccaccacgcctggaaaaccattaaggacgggaaccatcccacaacaggcaaagctattgaacaaagccctaataaccgcactgtagaagctctcgccggcgggaattcctttagcttcgaaattgcctttgagaacctgaaagaatgggagctgggtttgctcatccacagcctgcaactcgaaaagggtctggcgcataaacttggaatggcaaagtctatgggatttggttcagttgaaattgacgtcgaatcagtgcgcctgagaaaagattggaagcaatggcggaatggcaattccgaaattcccaactggttgggaaaaggatttgctaaactgaaggaatggttccgggacgagctcgattttatagaaaatcttaagaaacttctttggtttcctgagggcgaccaagcaccccgggtttgctaccccatgctgcgaaagaaggacgatcctaatgggaatagcggttacgaagaactcaaagacggggaattcaagaaagaagatcggcagaagaagctgaccacgccgtggacaccgtgggcaatgtccctgtacgatgacctaggagtggagaccagtgactcaaaaacagaaggctggtccaaaaacttcaaacttctgcagtctcagcttcaggtgaagaaggcagctctcactcaggcaaagagccaaaggacgaaacaaagtacagtcctcgccccagtcattgacctgaagcgaggtggctcctcagatgaccggcaaattgtggacactccaccgcatgtagcagctgggctgaaggatcctgttcccagtgggttttctgcaggggaagttctgattcccttagctgacgaatatgaccctatgtttcctaatgattatgagaaagtagtgaagcgccaaagagaggaacgacagagacagcgggagctggaaagacaaaaggaaatagaagaaagggaaaaaaggcgtaaagacagacatgaagcaagtgggtttgcaaggagaccagatccagattctgatgaagatgaagattatgagcgagagaggaggaaaagaagtatgggcggagctgccattgccccacccacttctctggtagagaaagacaaagagttaccccgagattttccttatgaagaggactcaagacctcgatcacagtcttccaaagcagccattcctcccccagtgtacgaggaacaagacagaccgagatctccaaccggacctagcaactccttcctcgctaacatggggggcacggtggcgcacaagatcatgcagaagtacggcttccgggagggccagggtctggggaagcatgagcagggcctgagcactgccttgtcagtggagaagaccagcaagcgtggcggcaagatcatcgtgggcgacgccacagagaaagatgcatccaagaagtcagattcaaatccgctgactgaaatacttaagtgtcctactaaagtggtcttactaaggaacatggttggtgcgggagaggtggatgaagacttggaagttgaaaccaaggaagaatgtgaaaaatatggcaaagttggaaaatgtgtgatatttgaaattcctggtgcccctgatgatgaagcagtacggatatttttagaatttgagagagttgaatcagcaattaaagcggttgttgacttgaatgggaggtattttggtggacgggtggtaaaagcatgtttctacaatttggacaaattcagggtcttggatttggcagaacaagttaaacggacagccgacggaagcgagttcgagtcaccaaagaagaagcggaaagtc

SEQ ID NO: 560 - DNA, 5487 bp, synthetic construct
  source 1..5487: mol_type = other DNA
atgaaacggacagccgacggaagcgagttcgagtcaccaaagaagaagcggaaagtcacgactactatgaagatttcaattgaattcctcgagccgtttcggatgaccaaatggcaggaaagcactaggcgaaacaagaacaacaaggaatttgttcgcggccaagcttttgcaagatggcatagaaataagaaggataacacaaaagggcggccttacataactgggacattgctgcggtccgcagtaattagaagcgcggaaaacctgctgacattgagtgatgggaaaattagcgaaaagacatgttgtcctgggaaatttgatacggaagataaagacaggttgctgcaattgaggcagcggtccacccttcgttggaccgataagaacccctgtccagataacgctgaaacttactgcccgttttgcgaacttctcgggagatccggtaacgatggaaagaaggctgagaagaaggattggcgctttcgtattcattttggcaatctttcccttccagggaagcccgatttcgacgggccaaaagctataggcagccaacgggtacttaacagggtcgatttcaaatccggtaaggcccatgacttctttaaggcttacgaagtcgaccatactaggtttccccgcttcgaaggggagattaccatagataataaagtcagcgctgaagccaggaaactgctctgtgattctctcaagtttacggatcggctgtgtggagctctgtgcgtaatcaggttcgatgaatatacaccagcagccgatagtgggaaacaaaccgaaaatgtccaagcagaaccgaatgctaatctcgctgaaaagaccgcagagcaaattattagcattctggacgataataagaaaaccgaatatacccgcctgcttgctgatgctattcgttcactccgccgctctagtaaacttgtcgctggcttgccaaaggatcatgacgggaaggatgaccattacctctgggatatcggcaagaagaagaaagacgaaaactctgtcactattaggcaaatccttacgacctcagcagacaccaaggaactcaagaatgccggaaaatggagagaattctgcgagaagctgggtgaagcgctgtacctcaagagtaaagacatgagtggcggcctgaaaattactcggagaatactgggcgatgctgaattccatggaaagcccgatcggcttgaaaagagccggtctgtgtcaatcggatctgtgttgaaagaaactgtggtatgcggcgaactggtcgctaaaacgcccttcttcttcggagcgatagacgaagatgcaaaacaaaccgacctgcaagtactcctcactcccgataacaagtatagactgccaagaagcgccgtgcgaggtatactccgtcgagatcttcaaacctattttgatagcccatgcaatgctgagttgggtggacggccatgcatgtgtaagacgtgtaggattatgagagggatcacggtgatggatgcgcgcagtgagtacaatgccccgccagaaataaggcatcgtacccgcattaatcccttcacaggcacggttgcggaaggtgccctgtttaatatggaagtagcccccgaggggattgtctttccatttcaactccggtaccggggctctgaagatgggctgcccgatgcactgaaaacggtgttgaaatggtgggctgaggggcaggcattcatgagtggcgctgcctcaaccgggaagggccgattccggatggaaaatgctaaatatgaaacgctggatctgagcgacgagaatcaaaggaatgactatcttaagaattggggatggcgtgacgagaaggggctcgaggaactgaagaaacgactgaactcaggtctgccagagcccggtaattatagggatccaaaatggcacgagattaacgtttccattgagatggcaagcccttttattaatggcgacccaatccgcgcagccgtggacaaacgtggtacagatgtggttaccttcgttaagtataaagctgaaggggaagaggcgaaacccgtatgtgcatacaaggccgaatcttttagaggggtgatcagaagtgccgtggcacgcattcatatggaagatggcgtccctttgactgagttgactcacagtgactgtgaatgtctcctgtgccaaatctttggaagtgagtatgaagccggcaaaataaggtttgaagatctcgtattcgaaagtgacccggaacctgtgaccttcgatcatgtggccatcgatagattcactggcggtgcagctgataagaagaaattcgatgattcccctctgcccggtagccctgcaagaccgctcatgttgaaaggctccttctggatccgcagggacgttctcgaggacgaagagtactgtaaggcactcggtaaggctcttgcagatgtgaataatggcctttatcccctcggtggaaagagcgccatcggctacggacaggtcaagagtctgggtataaagggagatgataagaggatttctcgcctcatgaatcctgcctttgatgagacagatgtagccgttccagaaaagcccaaaactgatgccgaggttcgcatcgaggcagagaaagtatattacccacactatttcgtcgaaccccataagaaggtggaacgcgaggagaaaccctgtggtcatcaaaagttccacgaggggcgactgacaggtaaaattcggtgtaagctcattaccaagacacccctcatcgtcccagatactagtaatgacgatttcttcagacctgcggataaagaagctcggaaggaaaaggacgaatatcataaatcatatgctttcttcagacttcataaacaaatcatgattcccgggagcgaattgagaggaatggtgagtagtgtctacgaaactgtgacaaattcttgcttcaggatatttgatgagactaaacggttgtcatggcggatggatgctgatcaccagaatgtgctgcaagactttctcccaggtcgagtgaccgccgatgggaaacatatacaaaagttttccgggggtgggtcacgaactgtagacgataggatgatcggcaaacgtatgagcgccgatctgcggccgtgccatggagattgggtggaagatggtgatctcagtgccttgaatgcatatcccgagaaaagactcctcttgcgccaccccaaaggactctgccctgcttgccggctctttggaaccggatcttacaagggcagagtcaggtttggattcgcgtcactcgaaaacgatccggagtggctgatcccaggcaagaatcccggcgatccgtttcacggcgggccggtgatgctctcattgttggaacggcctcgcccgacttggagtataccgggatccgacaataagtttaaagtgcctggcagaaagttttacgtccaccaccacgcctggaaaaccattaaggacgggaaccatcccacaacaggcaaagctattgaacaaagccctaataaccgcactgtagaagctctcgccggcgggaattcctttagcttcgaaattgcctttgagaacctgaaagaatgggagctgggtttgctcatccacagcctgcaactcgaaaagggtctggcgcataaacttggaatggcaaagtctatgggatttggttcagttgaaattgacgtcgaatcagtgcgcctgagaaaagattggaagcaatggcggaatggcaattccgaaattcccaactggttgggaaaaggatttgctaaactgaaggaatggttccgggacgagctcgattttatagaaaatcttaagaaacttctttggtttcctgagggcgaccaagcaccccgggtttgctaccccatgctgcgaaagaaggacgatcctaatgggaatagcggttacgaagaactcaaagacggggaattcaagaaagaagatcggcagaagaagctgaccacgccgtggacaccgtgggcaatgtcggacttcgacgagttcgagcggcagctcaacgagaataaacaagagcgggacaaggagaaccggcatcggaagcgcagccacagccgctctcggagccgggaccgcaaacgccggagccggagccgcgaccggcgcaaccgggaccagcggagcgcctcccgggacaggcgacgacgcagcaaacctttgaccagaggcgctaaagaggagcacggtggactgattcgttccccccgccacgagaagaagaagaaggtccgtaaatactgggacgtgccacccccaggctttgagcacatcaccccaatgcagtacaaggccatgcaagctgcgggtcagattccagccactgctcttctccccaccatgacccctgacggtctggctgtgaccccaacgccggtgcccgtggtcgggagccagatgaccagacaagcccggcgcctctacgtgggcaacatcccctttggcatcactgaggaggccatgatggatttcttcaacgcccagatgcgcctgggggggctgacccaggcccctggcaacccagtgttggctgtgcagattaaccaggacaagaattttgcctttttggagttccgctcagtggacgagactacccaggctatggcctttgatggcatcatcttccagggccagtcactaaagatccgcaggcctcacgactaccagccgcttcctggcatgtcagagaacccctccgtctatgtgcctggggttgtgtccactgtggtccccgactctgcccacaagctgttcatcgggggcttacccaactacctgaacgatgaccaggtcaaagagctgctgacatcctttgggcccctcaaggccttcaacctggtcaaggacagtgccacggggctctccaagggctacgccttctgtgagtacgtggacatcaacgtcacggatcaggccattgcggggctgaacggcatgcagctgggggataagaagctgctggtccagagggcgagtgtgggagccaagaatgccacgctggtgagccccccgagcaccatcaatcagacgcctgtgaccctgcaagtgccgggcttgatgagctcccaggtgcagatgggcggccacccgactgaggtcctgtgcctcatgaacatggtgctgcctgaggagctgctggacgacgaggagtatgaggagatcgtggaggacgtgcgggacgagtgcagcaagtacgggcttgtcaagtccatcgagatcccccggcctgtggacggcgtcgaggtgcccggctgcggaaagatctttgtggagttcacctctgtgtttgactgccagaaagccatgcagggcctgacgggccgcaagttcgccaacagagtggttgtcacaaaatactgtgaccccgactcttatcaccgccgggacttctggaaacggacagccgacggaagcgagttcgagtcaccaaagaagaagcggaaagtc

SEQ ID NO: 561 - DNA, 4062 bp, synthetic construct
  source 1..4062: mol_type = other DNA
atgaaacggacagccgacggaagcgagttcgagtcaccaaagaagaagcggaaagtcacgactactatgaagatttcaattgaattcctcgagccgtttcggatgaccaaatggcaggaaagcactaggcgaaacaagaacaacaaggaatttgttcgcggccaagcttttgcaagatggcatagaaataagaaggataacacaaaagggcggccttacataactgggacattgctgcggtccgcagtaattagaagcgcggaaaacctgctgacattgagtgatgggaaaattagcgaaaagacatgttgtcctgggaaatttgatacggaagataaagacaggttgctgcaattgaggcagcggtccacccttcgttggaccgataagaacccctgtccagataacgctgaaacttactgcccgttttgcgaacttctcgggagatccggtaacgatggaaagaaggctgagaagaaggattggcgctttcgtattcattttggcaatctttcccttccagggaagcccgatttcgacgggccaaaagctataggcagccaacgggtacttaacagggtcgatttcaaatccggtaaggcccatgacttctttaaggcttacgaagtcgaccatactaggtttccccgcttcgaaggggagattaccatagataataaagtcagcgctgaagccaggaaactgctctgtgattctctcaagtttacggatcggctgtgtggagctctgtgcgtaatcaggttcgatgaatatacaccagcagccgatagtgggaaacaaaccgaaaatgtccaagcagaaccgaatgctaatctcgctgaaaagaccgcagagcaaattattagcattctggacgataataagaaaaccaggtatacccgcctgcttgctgatgctattcgttcactccgccgctctagtaaacttgtcgctggcttgccaaaggatcatgacgggaaggatgaccattacctctgggatatcggcaagaagaagaaagacgaaaactctgtcactattaggcaaatccttacgacctcagcagacaccaaggaactcaagaatgccggaaaatggagagaattctgcgagaagctgggtgaagcgctgtacctcaagagtaaagacatgagtggcggcctgaaaattactcggagaatactgggcgatgctgaattccatggaaagcccgatcggcttgaaaagagccggtctgtgtcaatcggatctgtgttgaaagaaactgtggtatgcggcgaactggtcgctaaaacgcccttcttcttcggagcgatagacgaagatgcaaaacaaaccgacctgcaagtactcctcactcccgataacaagtatagactgccaagaagcgccgtgcgaggtatactccgtcgagatcttcaaacctattttgatagcccatgcaatgctgagttgggtggacggccatgcatgtgtaagacgtgtaggattatgagagggatcacggtgatggatgcgcgcagtgagtacaatgccccgccagaaataaggcatcgtacccgcattaatcccttcacaggcacggttgcggaaggtgccctgtttaatatggaagtagcccccgaggggattgtctttccatttcaactccggtaccggggctctgaagatgggctgcccgatgcactgaaaacggtgttgaaatggtgggctgaggggcaggcattcatgagtggcgctgcctcaaccgggaagggccgattccggatggaaaatgctaaatatgaaacgctggatctgagcgacgagaatcaaaggaatgactatcttaagaattggggatggcgtgacgagaaggggctcgaggaactgaagaaacgactgaactcaggtctgccagagcccggtaattatagggatccaaaatggcacgagattaacgtttccattgagatggcaagcccttttattaatggcgacccaatccgcgcagccgtggacaaacgtggtacagatgtggttaccttcgttaagtataaagctgaaggggaagaggcgaaacccgtatgtgcatacaaggccgaatcttttagaggggtgatcagaagtgccgtggcacgcattcatatggaagatggcgtccctttgactgagttgactcacagtgactgtgaatgtctcctgtgccaaatctttggaagtgagtatgaagccggcaaaataaggtttgaagatctcgtattcgaaagtgacccggaacctgtgaccttcgatcatgtggccatcgatagattcactggcggtgcagctgataagaagaaattcgatgattcccctctgcccggtagccctgcaagaccgctcatgttgaaaggctccttctggatccgcagggacgttctcgaggacgaagagtactgtaaggcactcggtaaggctcttgcagatgtgaataatggcctttatcccctcggtggaaagagcgccatcggctacggacaggtcaagagtctgggtataaagggagatgataagaggatttctcgcctcatgaatcctgcctttgatgagacagatgtagccgttccagaaaagcccaaaactgatgccgaggttcgcatcgaggcagagaaagtatattacccacactatttcgtcgaaccccataagaaggtggaacgcgaggagaaaccctgtggtcatcaaaagttccacgaggggcgactgacaggtaaaattcggtgtaagctcattaccaagacacccctcatcgtcccagatactagtaatgacgatttcttcagacctgcggataaagaagctcggaaggaaaaggacgaatatcataaatcatatgctttcttcagacttcataaacaaatcatgattcccgggagcgaattgagaggaatggtgagtagtgtctacgaaactgtgacaaattcttgcttcaggatatttgatgagactaaacggttgtcatggcggatggatgctgatcaccagaatgtgctgcaaaagtttctcccaggtcgagtgaccgccgatgggaaacatatacaaaagttttccgggggtgggtcacgaactgtagacgataggatgatcggcaaacgtatgagcgccgatctgcggccgtgccatggagattgggtggaagatggtgatctcagtgccttgaatgcatatcccgagaaaagactcctcttgcgccaccccaaaggactctgccctgcttgccggctctttggaaccggatcttacaagggcagagtcaggtttggattcgcgtcactcgaaaacgatccggagtggctgatcccaggcaagaatcccggcgatccgtttcacggcgggccggtgatgctctcattgttggaacggcctcgcccgacttggagtataccgggatccgacaataagtttaaagtgcctggcagaaagttttacgtccaccaccacgcctggaaaaccattaaggacgggaaccatcccacaacaggcaaagctattgaacaaagccctaataaccgcactgtagaagctctcgccggcgggaattcctttagcttcgaaattgcctttgagaacctgaaagaatgggagctgggtttgctcatccacagcctgcaactcgaaaagggtctggcgcataaacttggaatggcaaagtctatgggatttggttcagttgaaattgacgtcgaatcagtgcgcctgagaaaagattggaagcaatggcggaatggcaattccgaaattcccaactggttgggaaaaggatttgctaaactgaaggaatggttccgggacgagctcgattttatagaaaatcttaagaaacttctttggtttcctgagggcgaccaagcaccccgggtttgctaccccatgctgcgaaagaaggacgatcctaatgggaatagcggttacgaagaactcaaaagaggggaattcaagaaagaagatcggcagaagaagctgaccacgccgtggacaccgtgggcaaaacggacagccgacggaagcgagttcgagtcaccaaagaagaagcggaaagtc

SEQ ID NO: 562 - DNA, 4062 bp, synthetic construct
  source 1..4062: mol_type = other DNA
atgaaacggacagccgacggaagcgagttcgagtcaccaaagaagaagcggaaagtcacgactactatgaagatttcaattgaattcctcgagccgtttcggatgaccaaatggcaggaaagcactaggcgaaacaagaacaacaaggaatttgttcgcggccaagcttttgcaagatggcatagaaataagaaggataacacaaaagggcggccttacataactgggacattgctgcggtccgcagtaattagaagcgcggaaaacctgctgacattgagtgatgggaaaattagcgaaaagacatgttgtcctgggaaatttgatacggaagataaagacaggttgctgcaattgaggcagcggtccacccttcgttggaccgataagaacccctgtccagataacgctgaaacttactgcccgttttgcgaacttctcgggagatccggtaacgatggaaagaaggctgagaagaaggattggcgctttcgtattcattttggcaatctttcccttccagggaagcccgatttcgacgggccaaaagctataggcagccaacgggtacttaacagggtcgatttcaaatccggtaaggcccatgacttctttaaggcttacgaagtcgaccatactaggtttccccgcttcgaaggggagattaccatagataataaagtcagcgctgaagccaggaaactgctctgtgattctctcaagtttacggatcggctgtgtggagctctgtgcgtaatcaggttcgatgaatatacaccagcagccgatagtgggaaacaaaccgaaaatgtccaagcagaaccgaatgctaatctcgctgaaaagaccgcagagcaaattattagcattctggacgataataagaaaaccgaatatacccgcctgcttgctgatgctattcgttcactccgccgctctagtaaacttgtcgctggcttgccaaaggatcatgacgggaaggatgaccataagctctgggatatcggcaagaagaagaaagacgaaaactctgtcactattaggcaaatccttacgacctcagcagacaccaaggaactcaagaatgccggaaaatggagagaattctgcgagaagctgggtgaagcgctgtacctcaagagtaaagacatgagtggcggcctgaaaattactcggagaatactgggcgatgctgaattccatggaaagcccgatcggcttgaaaagagccggtctgtgtcaatcggatctgtgttgaaagaaactgtggtatgcggcgaactggtcgctaaaacgcccttcttcttcggagcgatagacgaagatgcaaaacaaaccgacctgcaagtactcctcactcccgataacaagtatagactgccaagaagcgccgtgcgaggtatactccgtcgagatcttcaaacctattttgatagcccatgcaatgctgagttgggtggacggccatgcatgtgtaagacgtgtaggattatgagagggatcacggtgatggatgcgcgcagtgagtacaatgccccgccagaaataaggcatcgtacccgcattaatcccttcacaggcacggttgcggaaggtgccctgtttaatatggaagtagcccccgaggggattgtctttccatttcaactccggtaccggggctctgaagatgggctgcccgatgcactgaaaacggtgttgaaatggtgggctgaggggcaggcattcatgagtggcgctgcctcaaccgggaagggccgattccggatggaaaatgctaaatatgaaacgctggatctgagcgacgagaatcaaaggaatgactatcttaagaattggggatggcgtgacgagaaggggctcgaggaactgaagaaacgactgaactcaggtctgccagagcccggtaattatagggatccaaaatggcacgagattaacgtttccattgagatggcaagcccttttattaatggcgacccaatccgcgcagccgtggacaaacgtggtacagatgtggttaccttcgttaagtataaagctgaaggggaagaggcgaaacccgtatgtgcatacaaggccgaatcttttagaggggtgatcagaagtgccgtggcacgcattcatatggaagatggcgtccctttgactgagttgactcacagtgactgtgaatgtctcctgtgccaaatctttggaagtgagtatgaagccggcaaaataaggtttgaagatctcgtattcgaaagtgacccggaacctgtgaccttcgatcatgtggccatcgatagattcactggcggtgcagctgataagaagaaattcgatgattcccctctgcccggtagccctgcaagaccgctcatgttgaaaggctccttctggatccgcagggacgttctcgaggacgaagagtactgtaaggcactcggtaaggctcttgcagatgtgaataatggcctttatcccctcggtggaaagagcgccatcggctacggacaggtcaagagtctgggtataaagggagatgataagaggatttctcgcctcatgaatcctgcctttgatgagacagatgtagccgttccagaaaagcccaaaactgatgccgaggttcgcatcgaggcagagaaagtatattacccacactatttcgtcgaaccccataagaaggtggaacgcgaggagaaaccctgtggtcatcaaaagttccacgaggggcgactgacaggtaaaattcggtgtaagctcattaccaagacacccctcatcgtcccagatactagtaatgacgatttcttcagacctgcggataaagaagctcggaaggaaaaggacgaatatcataaatcatatgctttcttcagacttcataaacaaatcatgattcccgggagcgaattgagaggaatggtgagtagtgtctacgaaactgtgacaaattcttgcttcaggatatttgatgagactaaacggttgtcatggcggatggatgctgatcaccagaatgtgctgcaaaagtttctcccaggtcgagtgaccgccgatgggaaacatatacaaaagttttccgggggtgggtcacgaactgtagacgataggatgatcggcaaacgtatgagcgccgatctgcggccgtgccatggagattgggtggaagatggtgatctcagtgccttgaatgcatatcccgagaaaagactcctcttgcgccaccccaaaggactctgccctgcttgccggctctttggaaccggatcttacaagggcagagtcaggtttggattcgcgtcactcgaaaacgatccggagtggctgatcccaggcaagaatcccggcgatccgtttcacggcgggccggtgatgctctcattgttggaacggcctcgcccgacttggagtataccgggatccgacaataagtttaaagtgcctggcagaaagttttacgtccaccaccacgcctggaaaaccattaaggacgggaaccatcccacaacaggcaaagctattgaacaaagccctaataaccgcactgtagaagctctcgccggcgggaattcctttagcttcgaaattgcctttgagaacctgaaagaatgggagctgggtttgctcatccacagcctgcaactcgaaaagggtctggcgcataaacttggaatggcaaagtctatgggatttggttcagttgaaattgacgtcgaatcagtgcgcctgagaaaagattggaagcaatggcggaatggcaattccgaaattcccaactggttgggaaaaggatttgctaaactgaaggaatggttccgggacgagctcgattttatagaaaatcttaagaaacttctttggtttcctgagggcgaccaagcaccccgggtttgctaccccatgctgcgaaagaaggacgatcctaatgggaatagcggttacgaagaactcaaaagaggggaattcaagaaagaagatcggcagaagaagctgaccacgccgtggacaccgtgggcaaaacggacagccgacggaagcgagttcgagtcaccaaagaagaagcggaaagtc

SEQ ID NO: 563 - DNA, 4911 bp, synthetic construct
  source 1..4911: mol_type = other DNA
atgaaacggacagccgacggaagcgagttcgagtcaccaaagaagaagcggaaagtcacgactactatgaagatttcaattgaattcctcgagccgtttcggatgaccaaatggcaggaaagcactaggcgaaacaagaacaacaaggaatttgttcgcggccaagcttttgcaagatggcatagaaataagaaggataacacaaaagggcggccttacataactgggacattgctgcggtccgcagtaattagaagcgcggaaaacctgctgacattgagtgatgggaaaattagcgaaaagacatgttgtcctgggaaatttgatacggaagataaagacaggttgctgcaattgaggcagcggtccacccttcgttggaccgataagaacccctgtccagataacgctgaaacttactgcccgttttgcgaacttctcgggagatccggtaacgatggaaagaaggctgagaagaaggattggcgctttcgtattcattttggcaatctttcccttccagggaagcccgatttcgacgggccaaaagctataggcagccaacgggtacttaacagggtcgatttcaaatccggtaaggcccatgacttctttaaggcttacgaagtcgaccatactaggtttccccgcttcgaaggggagattaccatagataataaagtcagcgctgaagccaggaaactgctctgtgattctctcaagtttacggatcggctgtgtggagctctgtgcgtaatcaggttcgatgaatatacaccagcagccgatagtgggaaacaaaccgaaaatgtccaagcagaaccgaatgctaatctcgctgaaaagaccgcagagcaaattattagcattctggacgataataagaaaaccgaatatacccgcctgcttgctgatgctattcgttcactccgccgctctagtaaacttgtcgctggcttgccaaaggatcatgacgggaaggatgaccataagctctgggatatcggcaagaagaagaaagacgaaaactctgtcactattaggcaaatccttacgacctcagcagacaccaaggaactcaagaatgccggaaaatggagagaattctgcgagaagctgggtgaagcgctgtacctcaagagtaaagacatgagtggcggcctgaaaattactcggagaatactgggcgatgctgaattccatggaaagcccgatcggcttgaaaagagccggtctgtgtcaatcggatctgtgttgaaagaaactgtggtatgcggcgaactggtcgctaaaacgcccttcttcttcggagcgatagacgaagatgcaaaacaaaccgacctgcaagtactcctcactcccgataacaagtatagactgccaagaagcgccgtgcgaggtatactccgtcgagatcttcaaacctattttgatagcccatgcaatgctgagttgggtggacggccatgcatgtgtaagacgtgtaggattatgagagggatcacggtgatggatgcgcgcagtgagtacaatgccccgccagaaataaggcatcgtacccgcattaatcccttcacaggcacggttgcggaaggtgccctgtttaatatggaagtagcccccgaggggattgtctttccatttcaactccggtaccggggctctgaagatgggctgcccgatgcactgaaaacggtgttgaaatggtgggctgaggggcaggcattcatgagtggcgctgcctcaaccgggaagggccgattccggatggaaaatgctaaatatgaaacgctggatctgagcgacgagaatcaaaggaatgactatcttaagaattggggatggcgtgacgagaaggggctcgaggaactgaagaaacgactgaactcaggtctgccagagcccggtaattatagggatccaaaatggcacgagattaacgtttccattgagatggcaagcccttttattaatggcgacccaatccgcgcagccgtggacaaacgtggtacagatgtggttaccttcgttaagtataaagctgaaggggaagaggcgaaacccgtatgtgcatacaaggccgaatcttttagaggggtgatcagaagtgccgtggcacgcattcatatggaagatggcgtccctttgactgagttgactcacagtgactgtgaatgtctcctgtgccaaatctttggaagtgagtatgaagccggcaaaataaggtttgaagatctcgtattcgaaagtgacccggaacctgtgaccttcgatcatgtggccatcgatagattcactggcggtgcagctgataagaagaaattcgatgattcccctctgcccggtagccctgcaagaccgctcatgttgaaaggctccttctggatccgcagggacgttctcgaggacgaagagtactgtaaggcactcggtaaggctcttgcagatgtgaataatggcctttatcccctcggtggaaagagcgccatcggctacggacaggtcaagagtctgggtataaagggagatgataagaggatttctcgcctcatgaatcctgcctttgatgagacagatgtagccgttccagaaaagcccaaaactgatgccgaggttcgcatcgaggcagagaaagtatattacccacactatttcgtcgaaccccataagaaggtggaacgcgaggagaaaccctgtggtcatcaaaagttccacgaggggcgactgacaggtaaaattcggtgtaagctcattaccaagacacccctcatcgtcccagatactagtaatgacgatttcttcagacctgcggataaagaagctcggaaggaaaaggacgaatatcataaatcatatgctttcttcagacttcataaacaaatcatgattcccgggagcgaattgagaggaatggtgagtagtgtctacgaaactgtgacaaattcttgcttcaggatatttgatgagactaaacggttgtcatggcggatggatgctgatcaccagaatgtgctgcaaaagtttctcccaggtcgagtgaccgccgatgggaaacatatacaaaagttttccgaaactgcaagggtgcctttctatgacaaaacgcagaaacattttgacattcttgatgagcaagaaattgctggtgagaaacctgttcggatgtgggtcaagcgttttattaaacgactgagcctcgttgatcctgctaaacacccccagaagaaacaagacaataaatggaaaagacgcaaagaaggcatcgccacatttatagagcaaaagaatggctcttattattttaacgtggtcaccaataatggctgcacttctttccacttgtggcataaacctgacaattttgaccaggagaaactcgaaggcatacagaatggtgagaaactggattgctgggtaagagatagtagataccaaaaggcctttcaagagatacccgagaacgacccagacggatgggagtgtaaagagggctaccttcatgtcgtcggccccagcaaagtagagtttagtgacaagaaaggggatgtgatcaataactttcaaggaacactcccatcagttcccaacgactggaaaacaattaggacgaacgattttaagaataggaaaaggaagaatgaacctgtgttttgttgtgaggatgataagggcaattactataccatggctaaatattgcgaaaccttcttcttcgatctgaaggagaacgaggaatacgagatccccgagaaagcaagaatcaaatacaaagaactgctcagggtctataacaacaatcctcaagcagtgccggagagcgtatttcagtctagagttgcccgggaaaacgtggaaaagctgaagtccggagatcttgtgtatttcaaacataatgaaaagtacgtagaggacatcgtcccagtgcggatttcccgaactgtagacgataggatgatcggcaaacgtatgagcgccgatctgcggccgtgccatggagattgggtggaagatggtgatctcagtgccttgaatgcatatcccgagaaaagactcctcttgcgccaccccaaaggactctgccctgcttgccggctctttggaaccggatcttacaagggcagagtcaggtttggattcgcgtcactcgaaaacgatccggagtggctgatcccaggcaagaatcccggcgatccgtttcacggcgggccggtgatgctctcattgttggaacggcctcgcccgacttggagtataccgggatccgacaataagtttaaagtgcctggcagaaagttttacgtccaccaccacgcctggaaaaccattaaggacgggaaccatcccacaacaggcaaagctattgaacaaagccctaataaccgcactgtagaagctctcgccggcgggaattcctttagcttcgaaattgcctttgagaacctgaaagaatgggagctgggtttgctcatccacagcctgcaactcgaaaagggtctggcgcataaacttggaatggcaaagtctatgggatttggttcagttgaaattgacgtcgaatcagtgcgcctgagaaaagattggaagcaatggcggaatggcaattccgaaattcccaactggttgggaaaaggatttgctaaactgaaggaatggttccgggacgagctcgattttatagaaaatcttaagaaacttctttggtttcctgagggcgaccaagcaccccgggtttgctaccccatgctgcgaaagaaggacgatcctaatgggaatagcggttacgaagaactcaaaagaggggaattcaagaaagaagatcggcagaagaagctgaccacgccgtggacaccgtgggcaaaacggacagccgacggaagcgagttcgagtcaccaaagaagaagcggaaagtc

SEQ ID NO: 564 - DNA, 5286 bp, synthetic construct
  source 1..5286: mol_type = other DNA
atgaaacggacagccgacggaagcgagttcgagtcaccaaagaagaagcggaaagtcacgactactatgaagatttcaattgaattcctcgagccgtttcggatgaccaaatggcaggaaagcactaggcgaaacaagaacaacaaggaatttgttcgcggccaagcttttgcaagatggcatagaaataagaaggataacacaaaagggcggccttacataactgggacattgctgcggtccgcagtaattagaagcgcggaaaacctgctgacattgagtgatgggaaaattagcgaaaagacatgttgtcctgggaaatttgatacggaagataaagacaggttgctgcaattgaggcagcggtccacccttcgttggaccgataagaacccctgtccagataacgctgaaacttactgcccgttttgcgaacttctcgggagatccggtaacgatggaaagaaggctgagaagaaggattggcgctttcgtattcattttggcaatctttcccttccagggaagcccgatttcgacgggccaaaagctataggcagccaacgggtacttaacagggtcgatttcaaatccggtaaggcccatgacttctttaaggcttacgaagtcgaccatactaggtttccccgcttcgaaggggagattaccatagataataaagtcagcgctgaagccaggaaactgctctgtgattctctcaagtttacggatcggctgtgtggagctctgtgcgtaatcaggttcgatgaatatacaccagcagccgatagtgggaaacaaaccgaaaatgtccaagcagaaccgaatgctaatctcgctgaaaagaccgcagagcaaattattagcattctggacgataataagaaaaccgaatatacccgcctgcttgctgatgctattcgttcactccgccgctctagtaaacttgtcgctggcttgccaaaggatcatgacgggaaggatgaccattacctctgggatatcggcaagaagaagaaagacgaaaactctgtcactattaggcaaatccttacgacctcagcagacaccaaggaactcaagaatgccggaaaatggagagaattctgcgagaagctgggtgaagcgctgtacctcaagagtaaagacatgagtggcggcctgaaaattactcggagaatactgggcgatgctgaattccatggaaagcccgatcggcttgaaaagagccggtctgtgtcaatcggatctgtgttgaaagaaactgtggtatgcggcgaactggtcgctaaaacgcccttcttcttcggagcgatagacgaagatgcaaaacaaaccgacctgcaagtactcctcactcccgataacaagtatagactgccaagaagcgccgtgcgaggtatactccgtcgagatcttcaaacctattttgatagcccatgcaatgctgagttgggtggacggccatgcatgtgtaagacgtgtaggattatgagagggatcacggtgatggatgcgcgcagtgagtacaatgccccgccagaaataaggcatcgtacccgcattaatcccttcacaggcacggttgcggaaggtgccctgtttaatatggaagtagcccccgaggggattgtctttccatttcaactccggtaccggggctctgaagatgggctgcccgatgcactgaaaacggtgttgaaatggtgggctgaggggcaggcattcatgagtggcgctgcctcaaccgggaagggccgattccggatggaaaatgctaaatatgaaacgctggatctgagcgacgagaatcaaaggaatgactatcttaagaattggggatggcgtgacgagaaggggctcgaggaactgaagaaacgactgaactcaggtctgccagagcccggtaattatagggatccaaaatggcacgagattaacgtttccattgagatggcaagcccttttattaatggcgacccaatccgcgcagccgtggacaaacgtggtacagatgtggttaccttcgttaagtataaagctgaaggggaagaggcgaaacccgtatgtgcatacaaggccgaatcttttagaggggtgatcagaagtgccgtggcacgcattcatatggaagatggcgtccctttgactgagttgactcacagtgactgtgaatgtctcctgtgccaaatctttggaagtgagtatgaagccggcaaaataaggtttgaagatctcgtattcgaaagtgacccggaacctgtgaccttcgatcatgtggccatcgatagattcactggcggtgcagctgataagaagaaattcgatgattcccctctgcccggtagccctgcaagaccgctcatgttgaaaggctccttctggatccgcagggacgttctcgaggacgaagagtactgtaaggcactcggtaaggctcttgcagatgtgaataatggcctttatcccctcggtggaaagagcgccatcggctacggacaggtcaagagtctgggtataaagggagatgataagaggatttctcgcctcatgaatcctgcctttgatgagacagatgtagccgttccagaaaagcccaaaactgatgccgaggttcgcatcgaggcagagaaagtatattacccacactatttcgtcgaaccccataagaaggtggaacgcgaggagaaaccctgtggtcatcaaaagttccacgaggggcgactgacaggtaaaattcggtgtaagctcattaccaagacacccctcatcgtcccagatactagtaatgacgatttcttcagacctgcggataaagaagctcggaaggaaaaggacgaatatcataaatcatatgctttcttcagacttcataaacaaatcatgattcccgggagcgaattgagaggaatggtgagtagtgtctacgaaactgtgacaaattcttgcttcaggatatttgatgagactaaacggttgtcatggcggatggatgctgatcaccagaatgtgctgcaagactttctcccaggtcgagtgaccgccgatgggaaacatatacaaaagttttccgaaactgcaagggtgcctttctatgacaaaacgcagaaacattttgacattcttgatgagcaagaaattgctggtgagaaacctgttcggatgtgggtcaagcgttttattaaacgactgagcctcgttgatcctgctaaacacccccagaagaaacaagacaataaatggaaaagacgcaaagaaggcatcgccacatttatagagcaaaagaatggctcttattattttaacgtggtcaccaataatggctgcacttctttccacttgtggcataaacctgacaattttgaccaggagaaactcgaaggcatacagaatggtgagaaactggattgctgggtaagagatagtagataccaaaaggcctttcaagagatacccgagaacgacccagacggatgggagtgtaaagagggctaccttcatgtcgtcggccccagcaaagtagagtttagtgacaagaaaggggatgtgatcaataactttcaaggaacactcccatcagttcccaacgactggaaaacaattaggacgaacgattttaagaataggaaaaggaagaatgaacctgtgttttgttgtgaggatgataagggcaattactataccatggctaaatattgcgaaaccttcttcttcgatctgaaggagaacgaggaatacgagatccccgagaaagcaagaatcaaatacaaagaactgctcagggtctataacaacaatcctcaagcagtgccggagagcgtatttcagtctagagttgcccgggaaaacgtggaaaagctgaagtccggagatcttgtgtatttcaaacataatgaaaagtacgtagaggacatcgtcccagtgcggatttcccgaactgtagacgataggatgatcggcaaacgtatgagcgccgatctgcggccgtgccatggagattgggtggaagatggtgatctcagtgccttgaatgcatatcccgagaaaagactcctcttgcgccaccccaaaggactctgccctgcttgccggctctttggaaccggatcttacaagggcagagtcaggtttggattcgcgtcactcgaaaacgatccggagtggctgatcccaggcaagaatcccggcgatccgtttcacggcgggccggtgatgctctcattgttggaacggcctcgcccgacttggagtataccgggatccgacaataagtttaaagtgcctggcagaaagttttacgtccaccaccacgcctggaaaaccattaaggacgggaaccatcccacaacaggcaaagctattgaacaaagccctaataaccgcactgtagaagctctcgccggcgggaattcctttagcttcgaaattgcctttgagaacctgaaagaatgggagctgggtttgctcatccacagcctgcaactcgaaaagggtctggcgcataaacttggaatggcaaagtctatgggatttggttcagttgaaattgacgtcgaatcagtgcgcctgagaaaagattggaagcaatggcggaatggcaattccgaaattcccaactggttgggaaaaggatttgctaaactgaaggaatggttccgggacgagctcgattttatagaaaatcttaagaaacttctttggtttcctgagggcgaccaagcaccccgggtttgctaccccatgctgcgaaagaaggacgatcctaatgggaatagcggttacgaagaactcaaagacggggaattcaagaaagaagatcggcagaagaagctgaccacgccgtggacaccgtgggcaatggcgatgcaagcggccaagagggcgaacattcgacttccacctgaagtaaatcggatattgtatataagaaatttgccatacaaaatcacagctgaagaaatgtatgatatatttgggaaatatggacctattcgtcaaatcagagtggggaacacacctgaaactagaggaacagcttatgtggtctatgaggacatctttgatgccaagaatgcatgtgatcacctatcgggattcaatgtttgtaacagataccttgtggttttgtactataatgccaacagggcatttcagaagatggacacaaagaagaaggaggaacagttgaagcttctcaaggagaaatatggcatcaacacagatccaccaaaaaaacggacagccgacggaagcgagttcgagtcaccaaagaagaagcggaaagtc

SEQ ID NO: 565 - DNA, 6336 bp, synthetic construct
  source 1..6336: mol_type = other DNA
atgaaacggacagccgacggaagcgagttcgagtcaccaaagaagaagcggaaagtcacgactactatgaagatttcaattgaattcctcgagccgtttcggatgaccaaatggcaggaaagcactaggcgaaacaagaacaacaaggaatttgttcgcggccaagcttttgcaagatggcatagaaataagaaggataacacaaaagggcggccttacataactgggacattgctgcggtccgcagtaattagaagcgcggaaaacctgctgacattgagtgatgggaaaattagcgaaaagacatgttgtcctgggaaatttgatacggaagataaagacaggttgctgcaattgaggcagcggtccacccttcgttggaccgataagaacccctgtccagataacgctgaaacttactgcccgttttgcgaacttctcgggagatccggtaacgatggaaagaaggctgagaagaaggattggcgctttcgtattcattttggcaatctttcccttccagggaagcccgatttcgacgggccaaaagctataggcagccaacgggtacttaacagggtcgatttcaaatccggtaaggcccatgacttctttaaggcttacgaagtcgaccatactaggtttccccgcttcgaaggggagattaccatagataataaagtcagcgctgaagccaggaaactgctctgtgattctctcaagtttacggatcggctgtgtggagctctgtgcgtaatcaggttcgatgaatatacaccagcagccgatagtgggaaacaaaccgaaaatgtccaagcagaaccgaatgctaatctcgctgaaaagaccgcagagcaaattattagcattctggacgataataagaaaaccgaatatacccgcctgcttgctgatgctattcgttcactccgccgctctagtaaacttgtcgctggcttgccaaaggatcatgacgggaaggatgaccattacctctgggatatcggcaagaagaagaaagacgaaaactctgtcactattaggcaaatccttacgacctcagcagacaccaaggaactcaagaatgccggaaaatggagagaattctgcgagaagctgggtgaagcgctgtacctcaagagtaaagacatgagtggcggcctgaaaattactcggagaatactgggcgatgctgaattccatggaaagcccgatcggcttgaaaagagccggtctgtgtcaatcggatctgtgttgaaagaaactgtggtatgcggcgaactggtcgctaaaacgcccttcttcttcggagcgatagacgaagatgcaaaacaaaccgacctgcaagtactcctcactcccgataacaagtatagactgccaagaagcgccgtgcgaggtatactccgtcgagatcttcaaacctattttgatagcccatgcaatgctgagttgggtggacggccatgcatgtgtaagacgtgtaggattatgagagggatcacggtgatggatgcgcgcagtgagtacaatgccccgccagaaataaggcatcgtacccgcattaatcccttcacaggcacggttgcggaaggtgccctgtttaatatggaagtagcccccgaggggattgtctttccatttcaactccggtaccggggctctgaagatgggctgcccgatgcactgaaaacggtgttgaaatggtgggctgaggggcaggcattcatgagtggcgctgcctcaaccgggaagggccgattccggatggaaaatgctaaatatgaaacgctggatctgagcgacgagaatcaaaggaatgactatcttaagaattggggatggcgtgacgagaaggggctcgaggaactgaagaaacgactgaactcaggtctgccagagcccggtaattatagggatccaaaatggcacgagattaacgtttccattgagatggcaagcccttttattaatggcgacccaatccgcgcagccgtggacaaacgtggtacagatgtggttaccttcgttaagtataaagctgaaggggaagaggcgaaacccgtatgtgcatacaaggccgaatcttttagaggggtgatcagaagtgccgtggcacgcattcatatggaagatggcgtccctttgactgagttgactcacagtgactgtgaatgtctcctgtgccaaatctttggaagtgagtatgaagccggcaaaataaggtttgaagatctcgtattcgaaagtgacccggaacctgtgaccttcgatcatgtggccatcgatagattcactggcggtgcagctgataagaagaaattcgatgattcccctctgcccggtagccctgcaagaccgctcatgttgaaaggctccttctggatccgcagggacgttctcgaggacgaagagtactgtaaggcactcggtaaggctcttgcagatgtgaataatggcctttatcccctcggtggaaagagcgccatcggctacggacaggtcaagagtctgggtataaagggagatgataagaggatttctcgcctcatgaatcctgcctttgatgagacagatgtagccgttccagaaaagcccaaaactgatgccgaggttcgcatcgaggcagagaaagtatattacccacactatttcgtcgaaccccataagaaggtggaacgcgaggagaaaccctgtggtcatcaaaagttccacgaggggcgactgacaggtaaaattcggtgtaagctcattaccaagacacccctcatcgtcccagatactagtaatgacgatttcttcagacctgcggataaagaagctcggaaggaaaaggacgaatatcataaatcatatgctttcttcagacttcataaacaaatcatgattcccgggagcgaattgagaggaatggtgagtagtgtctacgaaactgtgacaaattcttgcttcaggatatttgatgagactaaacggttgtcatggcggatggatgctgatcaccagaatgtgctgcaagactttctcccaggtcgagtgaccgccgatgggaaacatatacaaaagttttccgaaactgcaagggtgcctttctatgacaaaacgcagaaacattttgacattcttgatgagcaagaaattgctggtgagaaacctgttcggatgtgggtcaagcgttttattaaacgactgagcctcgttgatcctgctaaacacccccagaagaaacaagacaataaatggaaaagacgcaaagaaggcatcgccacatttatagagcaaaagaatggctcttattattttaacgtggtcaccaataatggctgcacttctttccacttgtggcataaacctgacaattttgaccaggagaaactcgaaggcatacagaatggtgagaaactggattgctgggtaagagatagtagataccaaaaggcctttcaagagatacccgagaacgacccagacggatgggagtgtaaagagggctaccttcatgtcgtcggccccagcaaagtagagtttagtgacaagaaaggggatgtgatcaataactttcaaggaacactcccatcagttcccaacgactggaaaacaattaggacgaacgattttaagaataggaaaaggaagaatgaacctgtgttttgttgtgaggatgataagggcaattactataccatggctaaatattgcgaaaccttcttcttcgatctgaaggagaacgaggaatacgagatccccgagaaagcaagaatcaaatacaaagaactgctcagggtctataacaacaatcctcaagcagtgccggagagcgtatttcagtctagagttgcccgggaaaacgtggaaaagctgaagtccggagatcttgtgtatttcaaacataatgaaaagtacgtagaggacatcgtcccagtgcggatttcccgaactgtagacgataggatgatcggcaaacgtatgagcgccgatctgcggccgtgccatggagattgggtggaagatggtgatctcagtgccttgaatgcatatcccgagaaaagactcctcttgcgccaccccaaaggactctgccctgcttgccggctctttggaaccggatcttacaagggcagagtcaggtttggattcgcgtcactcgaaaacgatccggagtggctgatcccaggcaagaatcccggcgatccgtttcacggcgggccggtgatgctctcattgttggaacggcctcgcccgacttggagtataccgggatccgacaataagtttaaagtgcctggcagaaagttttacgtccaccaccacgcctggaaaaccattaaggacgggaaccatcccacaacaggcaaagctattgaacaaagccctaataaccgcactgtagaagctctcgccggcgggaattcctttagcttcgaaattgcctttgagaacctgaaagaatgggagctgggtttgctcatccacagcctgcaactcgaaaagggtctggcgcataaacttggaatggcaaagtctatgggatttggttcagttgaaattgacgtcgaatcagtgcgcctgagaaaagattggaagcaatggcggaatggcaattccgaaattcccaactggttgggaaaaggatttgctaaactgaaggaatggttccgggacgagctcgattttatagaaaatcttaagaaacttctttggtttcctgagggcgaccaagcaccccgggtttgctaccccatgctgcgaaagaaggacgatcctaatgggaatagcggttacgaagaactcaaagacggggaattcaagaaagaagatcggcagaagaagctgaccacgccgtggacaccgtgggcaatgtcggacttcgacgagttcgagcggcagctcaacgagaataaacaagagcgggacaaggagaaccggcatcggaagcgcagccacagccgctctcggagccgggaccgcaaacgccggagccggagccgcgaccggcgcaaccgggaccagcggagcgcctcccgggacaggcgacgacgcagcaaacctttgaccagaggcgctaaagaggagcacggtggactgattcgttccccccgccacgagaagaagaagaaggtccgtaaatactgggacgtgccacccccaggctttgagcacatcaccccaatgcagtacaaggccatgcaagctgcgggtcagattccagccactgctcttctccccaccatgacccctgacggtctggctgtgaccccaacgccggtgcccgtggtcgggagccagatgaccagacaagcccggcgcctctacgtgggcaacatcccctttggcatcactgaggaggccatgatggatttcttcaacgcccagatgcgcctgggggggctgacccaggcccctggcaacccagtgttggctgtgcagattaaccaggacaagaattttgcctttttggagttccgctcagtggacgagactacccaggctatggcctttgatggcatcatcttccagggccagtcactaaagatccgcaggcctcacgactaccagccgcttcctggcatgtcagagaacccctccgtctatgtgcctggggttgtgtccactgtggtccccgactctgcccacaagctgttcatcgggggcttacccaactacctgaacgatgaccaggtcaaagagctgctgacatcctttgggcccctcaaggccttcaacctggtcaaggacagtgccacggggctctccaagggctacgccttctgtgagtacgtggacatcaacgtcacggatcaggccattgcggggctgaacggcatgcagctgggggataagaagctgctggtccagagggcgagtgtgggagccaagaatgccacgctggtgagccccccgagcaccatcaatcagacgcctgtgaccctgcaagtgccgggcttgatgagctcccaggtgcagatgggcggccacccgactgaggtcctgtgcctcatgaacatggtgctgcctgaggagctgctggacgacgaggagtatgaggagatcgtggaggacgtgcgggacgagtgcagcaagtacgggcttgtcaagtccatcgagatcccccggcctgtggacggcgtcgaggtgcccggctgcggaaagatctttgtggagttcacctctgtgtttgactgccagaaagccatgcagggcctgacgggccgcaagttcgccaacagagtggttgtcacaaaatactgtgaccccgactcttatcaccgccgggacttctggaaacggacagccgacggaagcgagttcgagtcaccaaagaagaagcggaaagtc

SEQ ID NO: 566 - DNA, 5286 bp, synthetic construct
  source 1..5286: mol_type = other DNA
atgaaacggacagccgacggaagcgagttcgagtcaccaaagaagaagcggaaagtcacgactactatgaagatttcaattgaattcctcgagccgtttcggatgaccaaatggcaggaaagcactaggcgaaacaagaacaacaaggaatttgttcgcggccaagcttttgcaagatggcatagaaataagaaggataacacaaaagggcggccttacataactgggacattgctgcggtccgcagtaattagaagcgcggaaaacctgctgacattgagtgatgggaaaattagcgaaaagacatgttgtcctgggaaatttgatacggaagataaagacaggttgctgcaattgaggcagcggtccacccttcgttggaccgataagaacccctgtccagataacgctgaaacttactgcccgttttgcgaacttctcgggagatccggtaacgatggaaagaaggctgagaagaaggattggcgctttcgtattcattttggcaatctttcccttccagggaagcccgatttcgacgggccaaaagctataggcagccaacgggtacttaacagggtcgatttcaaatccggtaaggcccatgacttctttaaggcttacgaagtcgaccatactaggtttccccgcttcgaaggggagattaccatagataataaagtcagcgctgaagccaggaaactgctctgtgattctctcaagtttacggatcggctgtgtggagctctgtgcgtaatcaggttcgatgaatatacaccagcagccgatagtgggaaacaaaccgaaaatgtccaagcagaaccgaatgctaatctcgctgaaaagaccgcagagcaaattattagcattctggacgataataagaaaaccgaatatacccgcctgcttgctgatgctattcgttcactccgccgctctagtaaacttgtcgctggcttgccaaaggatcatgacgggaaggatgaccattacctctgggatatcggcaagaagaagaaagacgaaaactctgtcactattaggcaaatccttacgacctcagcagacaccaaggaactcaagaatgccggaaaatggagagaattctgcgagaagctgggtgaagcgctgtacctcaagagtaaagacatgagtggcggcctgaaaattactcggagaatactgggcgatgctgaattccatggaaagcccgatcggcttgaaaagagccggtctgtgtcaatcggatctgtgttgaaagaaactgtggtatgcggcgaactggtcgctaaaacgcccttcttcttcggagcgatagacgaagatgcaaaacaaaccgacctgcaagtactcctcactcccgataacaagtatagactgccaagaagcgccgtgcgaggtatactccgtcgagatcttcaaacctattttgatagcccatgcaatgctgagttgggtggacggccatgcatgtgtaagacgtgtaggattatgagagggatcacggtgatggatgcgcgcagtgagtacaatgccccgccagaaataaggcatcgtacccgcattaatcccttcacaggcacggttgcggaaggtgccctgtttaatatggaagtagcccccgaggggattgtctttccatttcaactccggtaccggggctctgaagatgggctgcccgatgcactgaaaacggtgttgaaatggtgggctgaggggcaggcattcatgagtggcgctgcctcaaccgggaagggccgattccggatggaaaatgctaaatatgaaacgctggatctgagcgacgagaatcaaaggaatgactatcttaagaattggggatggcgtgacgagaaggggctcgaggaactgaagaaacgactgaactcaggtctgccagagcccggtaattatagggatccaaaatggcacgagattaacgtttccattgagatggcaagcccttttattaatggcgacccaatccgcgcagccgtggacaaacgtggtacagatgtggttaccttcgttaagtataaagctgaaggggaagaggcgaaacccgtatgtgcatacaaggccgaatcttttagaggggtgatcagaagtgccgtggcacgcattcatatggaagatggcgtccctttgactgagttgactcacagtgactgtgaatgtctcctgtgccaaatctttggaagtgagtatgaagccggcaaaataaggtttgaagatctcgtattcgaaagtgacccggaacctgtgaccttcgatcatgtggccatcgatagattcactggcggtgcagctgataagaagaaattcgatgattcccctctgcccggtagccctgcaagaccgctcatgttgaaaggctccttctggatccgcagggacgttctcgaggacgaagagtactgtaaggcactcggtaaggctcttgcagatgtgaataatggcctttatcccctcggtggaaagagcgccatcggctacggacaggtcaagagtctgggtataaagggagatgataagaggatttctcgcctcatgaatcctgcctttgatgagacagatgtagccgttccagaaaagcccaaaactgatgccgaggttcgcatcgaggcagagaaagtatattacccacactatttcgtcgaaccccataagaaggtggaacgcgaggagaaaccctgtggtcatcaaaagttccacgaggggcgactgacaggtaaaattcggtgtaagctcattaccaagacacccctcatcgtcccagatactagtaatgacgatttcttcagacctgcggataaagaagctcggaaggaaaaggacgaatatcataaatcatatgctttcttcagacttcataaacaaatcatgattcccgggagcgaattgagaggaatggtgagtagtgtctacgaaactgtgacaaattcttgcttcaggatatttgatgagactaaacggttgtcatggcggatggatgctgatcaccagaatgtgctgcaaaagtttctcccaggtcgagtgaccgccgatgggaaacatatacaaaagttttccgaaactgcaagggtgcctttctatgacaaaacgcagaaacattttgacattcttgatgagcaagaaattgctggtgagaaacctgttcggatgtgggtcaagcgttttattaaacgactgagcctcgttgatcctgctaaacacccccagaagaaacaagacaataaatggaaaagacgcaaagaaggcatcgccacatttatagagcaaaagaatggctcttattattttaacgtggtcaccaataatggctgcacttctttccacttgtggcataaacctgacaattttgaccaggagaaactcgaaggcatacagaatggtgagaaactggattgctgggtaagagatagtagataccaaaaggcctttcaagagatacccgagaacgacccagacggatgggagtgtaaagagggctaccttcatgtcgtcggccccagcaaagtagagtttagtgacaagaaaggggatgtgatcaataactttcaaggaacactcccatcagttcccaacgactggaaaacaattaggacgaacgattttaagaataggaaaaggaagaatgaacctgtgttttgttgtgaggatgataagggcaattactataccatggctaaatattgcgaaaccttcttcttcgatctgaaggagaacgaggaatacgagatccccgagaaagcaagaatcaaatacaaagaactgctcagggtctataacaacaatcctcaagcagtgccggagagcgtatttcagtctagagttgcccgggaaaacgtggaaaagctgaagtccggagatcttgtgtatttcaaacataatgaaaagtacgtagaggacatcgtcccagtgcggatttcccgaactgtagacgataggatgatcggcaaacgtatgagcgccgatctgcggccgtgccatggagattgggtggaagatggtgatctcagtgccttgaatgcatatcccgagaaaagactcctcttgcgccaccccaaaggactctgccctgcttgccggctctttggaaccggatcttacaagggcagagtcaggtttggattcgcgtcactcgaaaacgatccggagtggctgatcccaggcaagaatcccggcgatccgtttcacggcgggccggtgatgctctcattgttggaacggcctcgcccgacttggagtataccgggatccgacaataagtttaaagtgcctggcagaaagttttacgtccaccaccacgcctggaaaaccattaaggacgggaaccatcccacaacaggcaaagctattgaacaaagccctaataaccgcactgtagaagctctcgccggcgggaattcctttagcttcgaaattgcctttgagaacctgaaagaatgggagctgggtttgctcatccacagcctgcaactcgaaaagggtctggcgcataaacttggaatggcaaagtctatgggatttggttcagttgaaattgacgtcgaatcagtgcgcctgagaaaagattggaagcaatggcggaatggcaattccgaaattcccaactggttgggaaaaggatttgctaaactgaaggaatggttccgggacgagctcgattttatagaaaatcttaagaaacttctttggtttcctgagggcgaccaagcaccccgggtttgctaccccatgctgcgaaagaaggacgatcctaatgggaatagcggttacgaagaactcaaaagaggggaattcaagaaagaagatcggcagaagaagctgaccacgccgtggacaccgtgggcaatggcgatgcaagcggccaagagggcgaacattcgacttccacctgaagtaaatcggatattgtatataagaaatttgccatacaaaatcacagctgaagaaatgtatgatatatttgggaaatatggacctattcgtcaaatcagagtggggaacacacctgaaactagaggaacagcttatgtggtctatgaggacatctttgatgccaagaatgcatgtgatcacctatcgggattcaatgtttgtaacagataccttgtggttttgtactataatgccaacagggcatttcagaagatggacacaaagaagaaggaggaacagttgaagcttctcaaggagaaatatggcatcaacacagatccaccaaaaaaacggacagccgacggaagcgagttcgagtcaccaaagaagaagcggaaagtc

SEQ ID NO: 567 - DNA, 6336 bp, synthetic construct
  source 1..6336: mol_type = other DNA
atgaaacggacagccgacggaagcgagttcgagtcaccaaagaagaagcggaaagtcacgactactatgaagatttcaattgaattcctcgagccgtttcggatgaccaaatggcaggaaagcactaggcgaaacaagaacaacaaggaatttgttcgcggccaagcttttgcaagatggcatagaaataagaaggataacacaaaagggcggccttacataactgggacattgctgcggtccgcagtaattagaagcgcggaaaacctgctgacattgagtgatgggaaaattagcgaaaagacatgttgtcctgggaaatttgatacggaagataaagacaggttgctgcaattgaggcagcggtccacccttcgttggaccgataagaacccctgtccagataacgctgaaacttactgcccgttttgcgaacttctcgggagatccggtaacgatggaaagaaggctgagaagaaggattggcgctttcgtattcattttggcaatctttcccttccagggaagcccgatttcgacgggccaaaagctataggcagccaacgggtacttaacagggtcgatttcaaatccggtaaggcccatgacttctttaaggcttacgaagtcgaccatactaggtttccccgcttcgaaggggagattaccatagataataaagtcagcgctgaagccaggaaactgctctgtgattctctcaagtttacggatcggctgtgtggagctctgtgcgtaatcaggttcgatgaatatacaccagcagccgatagtgggaaacaaaccgaaaatgtccaagcagaaccgaatgctaatctcgctgaaaagaccgcagagcaaattattagcattctggacgataataagaaaaccgaatatacccgcctgcttgctgatgctattcgttcactccgccgctctagtaaacttgtcgctggcttgccaaaggatcatgacgggaaggatgaccattacctctgggatatcggcaagaagaagaaagacgaaaactctgtcactattaggcaaatccttacgacctcagcagacaccaaggaactcaagaatgccggaaaatggagagaattctgcgagaagctgggtgaagcgctgtacctcaagagtaaagacatgagtggcggcctgaaaattactcggagaatactgggcgatgctgaattccatggaaagcccgatcggcttgaaaagagccggtctgtgtcaatcggatctgtgttgaaagaaactgtggtatgcggcgaactggtcgctaaaacgcccttcttcttcggagcgatagacgaagatgcaaaacaaaccgacctgcaagtactcctcactcccgataacaagtatagactgccaagaagcgccgtgcgaggtatactccgtcgagatcttcaaacctattttgatagcccatgcaatgctgagttgggtggacggccatgcatgtgtaagacgtgtaggattatgagagggatcacggtgatggatgcgcgcagtgagtacaatgccccgccagaaataaggcatcgtacccgcattaatcccttcacaggcacggttgcggaaggtgccctgtttaatatggaagtagcccccgaggggattgtctttccatttcaactccggtaccggggctctgaagatgggctgcccgatgcactgaaaacggtgttgaaatggtgggctgaggggcaggcattcatgagtggcgctgcctcaaccgggaagggccgattccggatggaaaatgctaaatatgaaacgctggatctgagcgacgagaatcaaaggaatgactatcttaagaattggggatggcgtgacgagaaggggctcgaggaactgaagaaacgactgaactcaggtctgccagagcccggtaattatagggatccaaaatggcacgagattaacgtttccattgagatggcaagcccttttattaatggcgacccaatccgcgcagccgtggacaaacgtggtacagatgtggttaccttcgttaagtataaagctgaaggggaagaggcgaaacccgtatgtgcatacaaggccgaatcttttagaggggtgatcagaagtgccgtggcacgcattcatatggaagatggcgtccctttgactgagttgactcacagtgactgtgaatgtctcctgtgccaaatctttggaagtgagtatgaagccggcaaaataaggtttgaagatctcgtattcgaaagtgacccggaacctgtgaccttcgatcatgtggccatcgatagattcactggcggtgcagctgataagaagaaattcgatgattcccctctgcccggtagccctgcaagaccgctcatgttgaaaggctccttctggatccgcagggacgttctcgaggacgaagagtactgtaaggcactcggtaaggctcttgcagatgtgaataatggcctttatcccctcggtggaaagagcgccatcggctacggacaggtcaagagtctgggtataaagggagatgataagaggatttctcgcctcatgaatcctgcctttgatgagacagatgtagccgttccagaaaagcccaaaactgatgccgaggttcgcatcgaggcagagaaagtatattacccacactatttcgtcgaaccccataagaaggtggaacgcgaggagaaaccctgtggtcatcaaaagttccacgaggggcgactgacaggtaaaattcggtgtaagctcattaccaagacacccctcatcgtcccagatactagtaatgacgatttcttcagacctgcggataaagaagctcggaaggaaaaggacgaatatcataaatcatatgctttcttcagacttcataaacaaatcatgattcccgggagcgaattgagaggaatggtgagtagtgtctacgaaactgtgacaaattcttgcttcaggatatttgatgagactaaacggttgtcatggcggatggatgctgatcaccagaatgtgctgcaaaagtttctcccaggtcgagtgaccgccgatgggaaacatatacaaaagttttccgaaactgcaagggtgcctttctatgacaaaacgcagaaacattttgacattcttgatgagcaagaaattgctggtgagaaacctgttcggatgtgggtcaagcgttttattaaacgactgagcctcgttgatcctgctaaacacccccagaagaaacaagacaataaatggaaaagacgcaaagaaggcatcgccacatttatagagcaaaagaatggctcttattattttaacgtggtcaccaataatggctgcacttctttccacttgtggcataaacctgacaattttgaccaggagaaactcgaaggcatacagaatggtgagaaactggattgctgggtaagagatagtagataccaaaaggcctttcaagagatacccgagaacgacccagacggatgggagtgtaaagagggctaccttcatgtcgtcggccccagcaaagtagagtttagtgacaagaaaggggatgtgatcaataactttcaaggaacactcccatcagttcccaacgactggaaaacaattaggacgaacgattttaagaataggaaaaggaagaatgaacctgtgttttgttgtgaggatgataagggcaattactataccatggctaaatattgcgaaaccttcttcttcgatctgaaggagaacgaggaatacgagatccccgagaaagcaagaatcaaatacaaagaactgctcagggtctataacaacaatcctcaagcagtgccggagagcgtatttcagtctagagttgcccgggaaaacgtggaaaagctgaagtccggagatcttgtgtatttcaaacataatgaaaagtacgtagaggacatcgtcccagtgcggatttcccgaactgtagacgataggatgatcggcaaacgtatgagcgccgatctgcggccgtgccatggagattgggtggaagatggtgatctcagtgccttgaatgcatatcccgagaaaagactcctcttgcgccaccccaaaggactctgccctgcttgccggctctttggaaccggatcttacaagggcagagtcaggtttggattcgcgtcactcgaaaacgatccggagtggctgatcccaggcaagaatcccggcgatccgtttcacggcgggccggtgatgctctcattgttggaacggcctcgcccgacttggagtataccgggatccgacaataagtttaaagtgcctggcagaaagttttacgtccaccaccacgcctggaaaaccattaaggacgggaaccatcccacaacaggcaaagctattgaacaaagccctaataaccgcactgtagaagctctcgccggcgggaattcctttagcttcgaaattgcctttgagaacctgaaagaatgggagctgggtttgctcatccacagcctgcaactcgaaaagggtctggcgcataaacttggaatggcaaagtctatgggatttggttcagttgaaattgacgtcgaatcagtgcgcctgagaaaagattggaagcaatggcggaatggcaattccgaaattcccaactggttgggaaaaggatttgctaaactgaaggaatggttccgggacgagctcgattttatagaaaatcttaagaaacttctttggtttcctgagggcgaccaagcaccccgggtttgctaccccatgctgcgaaagaaggacgatcctaatgggaatagcggttacgaagaactcaaaagaggggaattcaagaaagaagatcggcagaagaagctgaccacgccgtggacaccgtgggcaatgtcggacttcgacgagttcgagcggcagctcaacgagaataaacaagagcgggacaaggagaaccggcatcggaagcgcagccacagccgctctcggagccgggaccgcaaacgccggagccggagccgcgaccggcgcaaccgggaccagcggagcgcctcccgggacaggcgacgacgcagcaaacctttgaccagaggcgctaaagaggagcacggtggactgattcgttccccccgccacgagaagaagaagaaggtccgtaaatactgggacgtgccacccccaggctttgagcacatcaccccaatgcagtacaaggccatgcaagctgcgggtcagattccagccactgctcttctccccaccatgacccctgacggtctggctgtgaccccaacgccggtgcccgtggtcgggagccagatgaccagacaagcccggcgcctctacgtgggcaacatcccctttggcatcactgaggaggccatgatggatttcttcaacgcccagatgcgcctgggggggctgacccaggcccctggcaacccagtgttggctgtgcagattaaccaggacaagaattttgcctttttggagttccgctcagtggacgagactacccaggctatggcctttgatggcatcatcttccagggccagtcactaaagatccgcaggcctcacgactaccagccgcttcctggcatgtcagagaacccctccgtctatgtgcctggggttgtgtccactgtggtccccgactctgcccacaagctgttcatcgggggcttacccaactacctgaacgatgaccaggtcaaagagctgctgacatcctttgggcccctcaaggccttcaacctggtcaaggacagtgccacggggctctccaagggctacgccttctgtgagtacgtggacatcaacgtcacggatcaggccattgcggggctgaacggcatgcagctgggggataagaagctgctggtccagagggcgagtgtgggagccaagaatgccacgctggtgagccccccgagcaccatcaatcagacgcctgtgaccctgcaagtgccgggcttgatgagctcccaggtgcagatgggcggccacccgactgaggtcctgtgcctcatgaacatggtgctgcctgaggagctgctggacgacgaggagtatgaggagatcgtggaggacgtgcgggacgagtgcagcaagtacgggcttgtcaagtccatcgagatcccccggcctgtggacggcgtcgaggtgcccggctgcggaaagatctttgtggagttcacctctgtgtttgactgccagaaagccatgcagggcctgacgggccgcaagttcgccaacagagtggttgtcacaaaatactgtgaccccgactcttatcaccgccgggacttctggaaacggacagccgacggaagcgagttcgagtcaccaaagaagaagcggaaagtc

SEQ ID NO: 568 - DNA, 5286 bp, synthetic construct
  source 1..5286: mol_type = other DNA
atgaaacggacagccgacggaagcgagttcgagtcaccaaagaagaagcggaaagtcacgactactatgaagatttcaattgaattcctcgagccgtttcggatgaccaaatggcaggaaagcactaggcgaaacaagaacaacaaggaatttgttcgcggccaagcttttgcaagatggcatagaaataagaaggataacacaaaagggcggccttacataactgggacattgctgcggtccgcagtaattagaagcgcggaaaacctgctgacattgagtgatgggaaaattagcgaaaagacatgttgtcctgggaaatttgatacggaagataaagacaggttgctgcaattgaggcagcggtccacccttcgttggaccgataagaacccctgtccagataacgctgaaacttactgcccgttttgcgaacttctcgggagatccggtaacgatggaaagaaggctgagaagaaggattggcgctttcgtattcattttggcaatctttcccttccagggaagcccgatttcgacgggccaaaagctataggcagccaacgggtacttaacagggtcgatttcaaatccggtaaggcccatgacttctttaaggcttacgaagtcgaccatactaggtttccccgcttcgaaggggagattaccatagataataaagtcagcgctgaagccaggaaactgctctgtgattctctcaagtttacggatcggctgtgtggagctctgtgcgtaatcaggttcgatgaatatacaccagcagccgatagtgggaaacaaaccgaaaatgtccaagcagaaccgaatgctaatctcgctgaaaagaccgcagagcaaattattagcattctggacgataataagaaaaccgaatatacccgcctgcttgctgatgctattcgttcactccgccgctctagtaaacttgtcgctggcttgccaaaggatcatgacgggaaggatgaccattacctctgggatatcggcaagaagaagaaagacgaaaactctgtcactattaggcaaatccttacgacctcagcagacaccaaggaactcaagaatgccggaaaatggagagaattctgcgagaagctgggtgaagcgctgtacctcaagagtaaagacatgagtggcggcctgaaaattactcggagaatactgggcgatgctgaattccatggaaagcccgatcggcttgaaaagagccggtctgtgtcaatcggatctgtgttgaaagaaactgtggtatgcggcgaactggtcgctaaaacgcccttcttcttcggagcgatagacgaagatgcaaaacaaaccgacctgcaagtactcctcactcccgataacaagtatagactgccaagaagcgccgtgcgaggtatactccgtcgagatcttcaaacctattttgatagcccatgcaatgctgagttgggtggacggccatgcatgtgtaagacgtgtaggattatgagagggatcacggtgatggatgcgcgcagtgagtacaatgccccgccagaaataaggcatcgtacccgcattaatcccttcacaggcacggttgcggaaggtgccctgtttaatatggaagtagcccccgaggggattgtctttccatttcaactccggtaccggggctctgaagatgggctgcccgatgcactgaaaacggtgttgaaatggtgggctgaggggcaggcattcatgagtggcgctgcctcaaccgggaagggccgattccggatggaaaatgctaaatatgaaacgctggatctgagcgacgagaatcaaaggaatgactatcttaagaattggggatggcgtgacgagaaggggctcgaggaactgaagaaacgactgaactcaggtctgccagagcccggtaattatagggatccaaaatggcacgagattaacgtttccattgagatggcaagcccttttattaatggcgacccaatccgcgcagccgtggacaaacgtggtacagatgtggttaccttcgttaagtataaagctgaaggggaagaggcgaaacccgtatgtgcatacaaggccgaatcttttagaggggtgatcagaagtgccgtggcacgcattcatatggaagatggcgtccctttgactgagttgactcacagtgactgtgaatgtctcctgtgccaaatctttggaagtgagtatgaagccggcaaaataaggtttgaagatctcgtattcgaaagtgacccggaacctgtgaccttcgatcatgtggccatcgatagattcactggcggtgcagctgataagaagaaattcgatgattcccctctgcccggtagccctgcaagaccgctcatgttgaaaggctccttctggatccgcagggacgttctcgaggacgaagagtactgtaaggcactcggtaaggctcttgcagatgtgaataatggcctttatcccctcggtggaaagagcgccatcggctacggacaggtcaagagtctgggtataaagggagatgataagaggatttctcgcctcatgaatcctgcctttgatgagacagatgtagccgttccagaaaagcccaaaactgatgccgaggttcgcatcgaggcagagaaagtatattacccacactatttcgtcgaaccccataagaaggtggaacgcgaggagaaaccctgtggtcatcaaaagttccacgaggggcgactgacaggtaaaattcggtgtaagctcattaccaagacacccctcatcgtcccagatactagtaatgacgatttcttcagacctgcggataaagaagctcggaaggaaaaggacgaatatcataaatcatatgctttcttcagacttcataaacaaatcatgattcccgggagcgaattgagaggaatggtgagtagtgtctacgaaactgtgacaaattcttgcttcaggatatttgatgagactaaacggttgtcatggcggatggatgctaagcaccagaatgtgctgcaaaagtttctcccaggtcgagtgaccgccgatgggaaacatatacaaaagttttccgaaactgcaagggtgcctttctatgacaaaacgcagaaacattttgacattcttgatgagcaagaaattgctggtgagaaacctgttcggatgtgggtcaagcgttttattaaacgactgagcctcgttgatcctgctaaacacccccagaagaaacaagacaataaatggaaaagacgcaaagaaggcatcgccacatttatagagcaaaagaatggctcttattattttaacgtggtcaccaataatggctgcacttctttccacttgtggcataaacctgacaattttgaccaggagaaactcgaaggcatacagaatggtgagaaactggattgctgggtaagagatagtagataccaaaaggcctttcaagagatacccgagaacgacccagacggatgggagtgtaaagagggctaccttcatgtcgtcggccccagcaaagtagagtttagtgacaagaaaggggatgtgatcaataactttcaaggaacactcccatcagttcccaacgactggaaaacaattaggacgaacgattttaagaataggaaaaggaagaatgaacctgtgttttgttgtgaggatgataagggcaattactataccatggctaaatattgcgaaaccttcttcttcgatctgaaggagaacgaggaatacgagatccccgagaaagcaagaatcaaatacaaagaactgctcagggtctataacaacaatcctcaagcagtgccggagagcgtatttcagtctagagttgcccgggaaaacgtggaaaagctgaagtccggagatcttgtgtatttcaaacataatgaaaagtacgtagaggacatcgtcccagtgcggatttcccgaactgtagacgataggatgatcggcaaacgtatgagcgccgatctgcggccgtgccatggagattgggtggaagatggtgatctcagtgccttgaatgcatatcccgagaaaagactcctcttgcgccaccccaaaggactctgccctgcttgccggctctttggaaccggatcttacaagggcagagtcaggtttggattcgcgtcactcgaaaacgatccggagtggctgatcccaggcaagaatcccggcgatccgtttcacggcgggccggtgatgctctcattgttggaacggcctcgcccgacttggagtataccgggatccgacaataagtttaaagtgcctggcagaaagttttacgtccaccaccacgcctggaaaaccattaaggacgggaaccatcccacaacaggcaaagctattgaacaaagccctaataaccgcactgtagaagctctcgccggcgggaattcctttagcttcgaaattgcctttgagaacctgaaagaatgggagctgggtttgctcatccacagcctgcaactcgaaaagggtctggcgcataaacttggaatggcaaagtctatgggatttggttcagttgaaattgacgtcgaatcagtgcgcctgagaaaagattggaagcaatggcggaatggcaattccgaaattcccaactggttgggaaaaggatttgctaaactgaaggaatggttccgggacgagctcgattttatagaaaatcttaagaaacttctttggtttcctgagggcgaccaagcaccccgggtttgctaccccatgctgcgaaagaaggacgatcctaatgggaatagcggttacgaagaactcaaaagaggggaattcaagaaagaagatcggcagaagaagctgaccacgccgtggacaccgtgggcaatggcgatgcaagcggccaagagggcgaacattcgacttccacctgaagtaaatcggatattgtatataagaaatttgccatacaaaatcacagctgaagaaatgtatgatatatttgggaaatatggacctattcgtcaaatcagagtggggaacacacctgaaactagaggaacagcttatgtggtctatgaggacatctttgatgccaagaatgcatgtgatcacctatcgggattcaatgtttgtaacagataccttgtggttttgtactataatgccaacagggcatttcagaagatggacacaaagaagaaggaggaacagttgaagcttctcaaggagaaatatggcatcaacacagatccaccaaaaaaacggacagccgacggaagcgagttcgagtcaccaaagaagaagcggaaagtc

SEQ ID NO: 569 - DNA, 6336 bp, synthetic construct
  source 1..6336: mol_type = other DNA
atgaaacggacagccgacggaagcgagttcgagtcaccaaagaagaagcggaaagtcacgactactatgaagatttcaattgaattcctcgagccgtttcggatgaccaaatggcaggaaagcactaggcgaaacaagaacaacaaggaatttgttcgcggccaagcttttgcaagatggcatagaaataagaaggataacacaaaagggcggccttacataactgggacattgctgcggtccgcagtaattagaagcgcggaaaacctgctgacattgagtgatgggaaaattagcgaaaagacatgttgtcctgggaaatttgatacggaagataaagacaggttgctgcaattgaggcagcggtccacccttcgttggaccgataagaacccctgtccagataacgctgaaacttactgcccgttttgcgaacttctcgggagatccggtaacgatggaaagaaggctgagaagaaggattggcgctttcgtattcattttggcaatctttcccttccagggaagcccgatttcgacgggccaaaagctataggcagccaacgggtacttaacagggtcgatttcaaatccggtaaggcccatgacttctttaaggcttacgaagtcgaccatactaggtttccccgcttcgaaggggagattaccatagataataaagtcagcgctgaagccaggaaactgctctgtgattctctcaagtttacggatcggctgtgtggagctctgtgcgtaatcaggttcgatgaatatacaccagcagccgatagtgggaaacaaaccgaaaatgtccaagcagaaccgaatgctaatctcgctgaaaagaccgcagagcaaattattagcattctggacgataataagaaaaccgaatatacccgcctgcttgctgatgctattcgttcactccgccgctctagtaaacttgtcgctggcttgccaaaggatcatgacgggaaggatgaccattacctctgggatatcggcaagaagaagaaagacgaaaactctgtcactattaggcaaatccttacgacctcagcagacaccaaggaactcaagaatgccggaaaatggagagaattctgcgagaagctgggtgaagcgctgtacctcaagagtaaagacatgagtggcggcctgaaaattactcggagaatactgggcgatgctgaattccatggaaagcccgatcggcttgaaaagagccggtctgtgtcaatcggatctgtgttgaaagaaactgtggtatgcggcgaactggtcgctaaaacgcccttcttcttcggagcgatagacgaagatgcaaaacaaaccgacctgcaagtactcctcactcccgataacaagtatagactgccaagaagcgccgtgcgaggtatactccgtcgagatcttcaaacctattttgatagcccatgcaatgctgagttgggtggacggccatgcatgtgtaagacgtgtaggattatgagagggatcacggtgatggatgcgcgcagtgagtacaatgccccgccagaaataaggcatcgtacccgcattaatcccttcacaggcacggttgcggaaggtgccctgtttaatatggaagtagcccccgaggggattgtctttccatttcaactccggtaccggggctctgaagatgggctgcccgatgcactgaaaacggtgttgaaatggtgggctgaggggcaggcattcatgagtggcgctgcctcaaccgggaagggccgattccggatggaaaatgctaaatatgaaacgctggatctgagcgacgagaatcaaaggaatgactatcttaagaattggggatggcgtgacgagaaggggctcgaggaactgaagaaacgactgaactcaggtctgccagagcccggtaattatagggatccaaaatggcacgagattaacgtttccattgagatggcaagcccttttattaatggcgacccaatccgcgcagccgtggacaaacgtggtacagatgtggttaccttcgttaagtataaagctgaaggggaagaggcgaaacccgtatgtgcatacaaggccgaatcttttagaggggtgatcagaagtgccgtggcacgcattcatatggaagatggcgtccctttgactgagttgactcacagtgactgtgaatgtctcctgtgccaaatctttggaagtgagtatgaagccggcaaaataaggtttgaagatctcgtattcgaaagtgacccggaacctgtgaccttcgatcatgtggccatcgatagattcactggcggtgcagctgataagaagaaattcgatgattcccctctgcccggtagccctgcaagaccgctcatgttgaaaggctccttctggatccgcagggacgttctcgaggacgaagagtactgtaaggcactcggtaaggctcttgcagatgtgaataatggcctttatcccctcggtggaaagagcgccatcggctacggacaggtcaagagtctgggtataaagggagatgataagaggatttctcgcctcatgaatcctgcctttgatgagacagatgtagccgttccagaaaagcccaaaactgatgccgaggttcgcatcgaggcagagaaagtatattacccacactatttcgtcgaaccccataagaaggtggaacgcgaggagaaaccctgtggtcatcaaaagttccacgaggggcgactgacaggtaaaattcggtgtaagctcattaccaagacacccctcatcgtcccagatactagtaatgacgatttcttcagacctgcggataaagaagctcggaaggaaaaggacgaatatcataaatcatatgctttcttcagacttcataaacaaatcatgattcccgggagcgaattgagaggaatggtgagtagtgtctacgaaactgtgacaaattcttgcttcaggatatttgatgagactaaacggttgtcatggcggatggatgctaagcaccagaatgtgctgcaaaagtttctcccaggtcgagtgaccgccgatgggaaacatatacaaaagttttccgaaactgcaagggtgcctttctatgacaaaacgcagaaacattttgacattcttgatgagcaagaaattgctggtgagaaacctgttcggatgtgggtcaagcgttttattaaacgactgagcctcgttgatcctgctaaacacccccagaagaaacaagacaataaatggaaaagacgcaaagaaggcatcgccacatttatagagcaaaagaatggctcttattattttaacgtggtcaccaataatggctgcacttctttccacttgtggcataaacctgacaattttgaccaggagaaactcgaaggcatacagaatggtgagaaactggattgctgggtaagagatagtagataccaaaaggcctttcaagagatacccgagaacgacccagacggatgggagtgtaaagagggctaccttcatgtcgtcggccccagcaaagtagagtttagtgacaagaaaggggatgtgatcaataactttcaaggaacactcccatcagttcccaacgactggaaaacaattaggacgaacgattttaagaataggaaaaggaagaatgaacctgtgttttgttgtgaggatgataagggcaattactataccatggctaaatattgcgaaaccttcttcttcgatctgaaggagaacgaggaatacgagatccccgagaaagcaagaatcaaatacaaagaactgctcagggtctataacaacaatcctcaagcagtgccggagagcgtatttcagtctagagttgcccgggaaaacgtggaaaagctgaagtccggagatcttgtgtatttcaaacataatgaaaagtacgtagaggacatcgtcccagtgcggatttcccgaactgtagacgataggatgatcggcaaacgtatgagcgccgatctgcggccgtgccatggagattgggtggaagatggtgatctcagtgccttgaatgcatatcccgagaaaagactcctcttgcgccaccccaaaggactctgccctgcttgccggctctttggaaccggatcttacaagggcagagtcaggtttggattcgcgtcactcgaaaacgatccggagtggctgatcccaggcaagaatcccggcgatccgtttcacggcgggccggtgatgctctcattgttggaacggcctcgcccgacttggagtataccgggatccgacaataagtttaaagtgcctggcagaaagttttacgtccaccaccacgcctggaaaaccattaaggacgggaaccatcccacaacaggcaaagctattgaacaaagccctaataaccgcactgtagaagctctcgccggcgggaattcctttagcttcgaaattgcctttgagaacctgaaagaatgggagctgggtttgctcatccacagcctgcaactcgaaaagggtctggcgcataaacttggaatggcaaagtctatgggatttggttcagttgaaattgacgtcgaatcagtgcgcctgagaaaagattggaagcaatggcggaatggcaattccgaaattcccaactggttgggaaaaggatttgctaaactgaaggaatggttccgggacgagctcgattttatagaaaatcttaagaaacttctttggtttcctgagggcgaccaagcaccccgggtttgctaccccatgctgcgaaagaaggacgatcctaatgggaatagcggttacgaagaactcaaaagaggggaattcaagaaagaagatcggcagaagaagctgaccacgccgtggacaccgtgggcaatgtcggacttcgacgagttcgagcggcagctcaacgagaataaacaagagcgggacaaggagaaccggcatcggaagcgcagccacagccgctctcggagccgggaccgcaaacgccggagccggagccgcgaccggcgcaaccgggaccagcggagcgcctcccgggacaggcgacgacgcagcaaacctttgaccagaggcgctaaagaggagcacggtggactgattcgttccccccgccacgagaagaagaagaaggtccgtaaatactgggacgtgccacccccaggctttgagcacatcaccccaatgcagtacaaggccatgcaagctgcgggtcagattccagccactgctcttctccccaccatgacccctgacggtctggctgtgaccccaacgccggtgcccgtggtcgggagccagatgaccagacaagcccggcgcctctacgtgggcaacatcccctttggcatcactgaggaggccatgatggatttcttcaacgcccagatgcgcctgggggggctgacccaggcccctggcaacccagtgttggctgtgcagattaaccaggacaagaattttgcctttttggagttccgctcagtggacgagactacccaggctatggcctttgatggcatcatcttccagggccagtcactaaagatccgcaggcctcacgactaccagccgcttcctggcatgtcagagaacccctccgtctatgtgcctggggttgtgtccactgtggtccccgactctgcccacaagctgttcatcgggggcttacccaactacctgaacgatgaccaggtcaaagagctgctgacatcctttgggcccctcaaggccttcaacctggtcaaggacagtgccacggggctctccaagggctacgccttctgtgagtacgtggacatcaacgtcacggatcaggccattgcggggctgaacggcatgcagctgggggataagaagctgctggtccagagggcgagtgtgggagccaagaatgccacgctggtgagccccccgagcaccatcaatcagacgcctgtgaccctgcaagtgccgggcttgatgagctcccaggtgcagatgggcggccacccgactgaggtcctgtgcctcatgaacatggtgctgcctgaggagctgctggacgacgaggagtatgaggagatcgtggaggacgtgcgggacgagtgcagcaagtacgggcttgtcaagtccatcgagatcccccggcctgtggacggcgtcgaggtgcccggctgcggaaagatctttgtggagttcacctctgtgtttgactgccagaaagccatgcagggcctgacgggccgcaagttcgccaacagagtggttgtcacaaaatactgtgaccccgactcttatcaccgccgggacttctggaaacggacagccgacggaagcgagttcgagtcaccaaagaagaagcggaaagtc

SEQ ID NO: 570 - DNA, 6114 bp, synthetic construct
  source 1..6114: mol_type = other DNA
atgaaacggacagccgacggaagcgagttcgagtcaccaaagaagaagcggaaagtcatgtccctgtacgatgacctaggagtggagaccagtgactcaaaaacagaaggctggtccaaaaacttcaaacttctgcagtctcagcttcaggtgaagaaggcagctctcactcaggcaaagagccaaaggacgaaacaaagtacagtcctcgccccagtcattgacctgaagcgaggtggctcctcagatgaccggcaaattgtggacactccaccgcatgtagcagctgggctgaaggatcctgttcccagtgggttttctgcaggggaagttctgattcccttagctgacgaatatgaccctatgtttcctaatgattatgagaaagtagtgaagcgccaaagagaggaacgacagagacagcgggagctggaaagacaaaaggaaatagaagaaagggaaaaaaggcgtaaagacagacatgaagcaagtgggtttgcaaggagaccagatccagattctgatgaagatgaagattatgagcgagagaggaggaaaagaagtatgggcggagctgccattgccccacccacttctctggtagagaaagacaaagagttaccccgagattttccttatgaagaggactcaagacctcgatcacagtcttccaaagcagccattcctcccccagtgtacgaggaacaagacagaccgagatctccaaccggacctagcaactccttcctcgctaacatggggggcacggtggcgcacaagatcatgcagaagtacggcttccgggagggccagggtctggggaagcatgagcagggcctgagcactgccttgtcagtggagaagaccagcaagcgtggcggcaagatcatcgtgggcgacgccacagagaaagatgcatccaagaagtcagattcaaatccgctgactgaaatacttaagtgtcctactaaagtggtcttactaaggaacatggttggtgcgggagaggtggatgaagacttggaagttgaaaccaaggaagaatgtgaaaaatatggcaaagttggaaaatgtgtgatatttgaaattcctggtgcccctgatgatgaagcagtacggatatttttagaatttgagagagttgaatcagcaattaaagcggttgttgacttgaatgggaggtattttggtggacgggtggtaaaagcatgtttctacaatttggacaaattcagggtcttggatttggcagaacaagttacgactactatgaagatttcaattgaattcctcgagccgtttcggatgaccaaatggcaggaaagcactaggcgaaacaagaacaacaaggaatttgttcgcggccaagcttttgcaagatggcatagaaataagaaggataacacaaaagggcggccttacataactgggacattgctgcggtccgcagtaattagaagcgcggaaaacctgctgacattgagtgatgggaaaattagcgaaaagacatgttgtcctgggaaatttgatacggaagataaagacaggttgctgcaattgaggcagcggtccacccttcgttggaccgataagaacccctgtccagataacgctgaaacttactgcccgttttgcgaacttctcgggagatccggtaacgatggaaagaaggctgagaagaaggattggcgctttcgtattcattttggcaatctttcccttccagggaagcccgatttcgacgggccaaaagctataggcagccaacgggtacttaacagggtcgatttcaaatccggtaaggcccatgacttctttaaggcttacgaagtcgaccatactaggtttccccgcttcgaaggggagattaccatagataataaagtcagcgctgaagccaggaaactgctctgtgattctctcaagtttacggatcggctgtgtggagctctgtgcgtaatcaggttcgatgaatatacaccagcagccgatagtgggaaacaaaccgaaaatgtccaagcagaaccgaatgctaatctcgctgaaaagaccgcagagcaaattattagcattctggacgataataagaaaaccgaatatacccgcctgcttgctgatgctattcgttcactccgccgctctagtaaacttgtcgctggcttgccaaaggatcatgacgggaaggatgaccattacctctgggatatcggcaagaagaagaaagacgaaaactctgtcactattaggcaaatccttacgacctcagcagacaccaaggaactcaagaatgccggaaaatggagagaattctgcgagaagctgggtgaagcgctgtacctcaagagtaaagacatgagtggcggcctgaaaattactcggagaatactgggcgatgctgaattccatggaaagcccgatcggcttgaaaagagccggtctgtgtcaatcggatctgtgttgaaagaaactgtggtatgcggcgaactggtcgctaaaacgcccttcttcttcggagcgatagacgaagatgcaaaacaaaccgacctgcaagtactcctcactcccgataacaagtatagactgccaagaagcgccgtgcgaggtatactccgtcgagatcttcaaacctattttgatagcccatgcaatgctgagttgggtggacggccatgcatgtgtaagacgtgtaggattatgagagggatcacggtgatggatgcgcgcagtgagtacaatgccccgccagaaataaggcatcgtacccgcattaatcccttcacaggcacggttgcggaaggtgccctgtttaatatggaagtagcccccgaggggattgtctttccatttcaactccggtaccggggctctgaagatgggctgcccgatgcactgaaaacggtgttgaaatggtgggctgaggggcaggcattcatgagtggcgctgcctcaaccgggaagggccgattccggatggaaaatgctaaatatgaaacgctggatctgagcgacgagaatcaaaggaatgactatcttaagaattggggatggcgtgacgagaaggggctcgaggaactgaagaaacgactgaactcaggtctgccagagcccggtaattatagggatccaaaatggcacgagattaacgtttccattgagatggcaagcccttttattaatggcgacccaatccgcgcagccgtggacaaacgtggtacagatgtggttaccttcgttaagtataaagctgaaggggaagaggcgaaacccgtatgtgcatacaaggccgaatcttttagaggggtgatcagaagtgccgtggcacgcattcatatggaagatggcgtccctttgactgagttgactcacagtgactgtgaatgtctcctgtgccaaatctttggaagtgagtatgaagccggcaaaataaggtttgaagatctcgtattcgaaagtgacccggaacctgtgaccttcgatcatgtggccatcgatagattcactggcggtgcagctgataagaagaaattcgatgattcccctctgcccggtagccctgcaagaccgctcatgttgaaaggctccttctggatccgcagggacgttctcgaggacgaagagtactgtaaggcactcggtaaggctcttgcagatgtgaataatggcctttatcccctcggtggaaagagcgccatcggctacggacaggtcaagagtctgggtataaagggagatgataagaggatttctcgcctcatgaatcctgcctttgatgagacagatgtagccgttccagaaaagcccaaaactgatgccgaggttcgcatcgaggcagagaaagtatattacccacactatttcgtcgaaccccataagaaggtggaacgcgaggagaaaccctgtggtcatcaaaagttccacgaggggcgactgacaggtaaaattcggtgtaagctcattaccaagacacccctcatcgtcccagatactagtaatgacgatttcttcagacctgcggataaagaagctcggaaggaaaaggacgaatatcataaatcatatgctttcttcagacttcataaacaaatcatgattcccgggagcgaattgagaggaatggtgagtagtgtctacgaaactgtgacaaattcttgcttcaggatatttgatgagactaaacggttgtcatggcggatggatgctgatcaccagaatgtgctgcaagactttctcccaggtcgagtgaccgccgatgggaaacatatacaaaagttttccgaaactgcaagggtgcctttctatgacaaaacgcagaaacattttgacattcttgatgagcaagaaattgctggtgagaaacctgttcggatgtgggtcaagcgttttattaaacgactgagcctcgttgatcctgctaaacacccccagaagaaacaagacaataaatggaaaagacgcaaagaaggcatcgccacatttatagagcaaaagaatggctcttattattttaacgtggtcaccaataatggctgcacttctttccacttgtggcataaacctgacaattttgaccaggagaaactcgaaggcatacagaatggtgagaaactggattgctgggtaagagatagtagataccaaaaggcctttcaagagatacccgagaacgacccagacggatgggagtgtaaagagggctaccttcatgtcgtcggccccagcaaagtagagtttagtgacaagaaaggggatgtgatcaataactttcaaggaacactcccatcagttcccaacgactggaaaacaattaggacgaacgattttaagaataggaaaaggaagaatgaacctgtgttttgttgtgaggatgataagggcaattactataccatggctaaatattgcgaaaccttcttcttcgatctgaaggagaacgaggaatacgagatccccgagaaagcaagaatcaaatacaaagaactgctcagggtctataacaacaatcctcaagcagtgccggagagcgtatttcagtctagagttgcccgggaaaacgtggaaaagctgaagtccggagatcttgtgtatttcaaacataatgaaaagtacgtagaggacatcgtcccagtgcggatttcccgaactgtagacgataggatgatcggcaaacgtatgagcgccgatctgcggccgtgccatggagattgggtggaagatggtgatctcagtgccttgaatgcatatcccgagaaaagactcctcttgcgccaccccaaaggactctgccctgcttgccggctctttggaaccggatcttacaagggcagagtcaggtttggattcgcgtcactcgaaaacgatccggagtggctgatcccaggcaagaatcccggcgatccgtttcacggcgggccggtgatgctctcattgttggaacggcctcgcccgacttggagtataccgggatccgacaataagtttaaagtgcctggcagaaagttttacgtccaccaccacgcctggaaaaccattaaggacgggaaccatcccacaacaggcaaagctattgaacaaagccctaataaccgcactgtagaagctctcgccggcgggaattcctttagcttcgaaattgcctttgagaacctgaaagaatgggagctgggtttgctcatccacagcctgcaactcgaaaagggtctggcgcataaacttggaatggcaaagtctatgggatttggttcagttgaaattgacgtcgaatcagtgcgcctgagaaaagattggaagcaatggcggaatggcaattccgaaattcccaactggttgggaaaaggatttgctaaactgaaggaatggttccgggacgagctcgattttatagaaaatcttaagaaacttctttggtttcctgagggcgaccaagcaccccgggtttgctaccccatgctgcgaaagaaggacgatcctaatgggaatagcggttacgaagaactcaaagacggggaattcaagaaagaagatcggcagaagaagctgaccacgccgtggacaccgtgggcaaaacggacagccgacggaagcgagttcgagtcaccaaagaagaagcggaaagtc

SEQ ID NO: 571 - DNA, 6114 bp, synthetic construct
  source 1..6114: mol_type = other DNA
atgaaacggacagccgacggaagcgagttcgagtcaccaaagaagaagcggaaagtcacgactactatgaagatttcaattgaattcctcgagccgtttcggatgaccaaatggcaggaaagcactaggcgaaacaagaacaacaaggaatttgttcgcggccaagcttttgcaagatggcatagaaataagaaggataacacaaaagggcggccttacataactgggacattgctgcggtccgcagtaattagaagcgcggaaaacctgctgacattgagtgatgggaaaattagcgaaaagacatgttgtcctgggaaatttgatacggaagataaagacaggttgctgcaattgaggcagcggtccacccttcgttggaccgataagaacccctgtccagataacgctgaaacttactgcccgttttgcgaacttctcgggagatccggtaacgatggaaagaaggctgagaagaaggattggcgctttcgtattcattttggcaatctttcccttccagggaagcccgatttcgacgggccaaaagctataggcagccaacgggtacttaacagggtcgatttcaaatccggtaaggcccatgacttctttaaggcttacgaagtcgaccatactaggtttccccgcttcgaaggggagattaccatagataataaagtcagcgctgaagccaggaaactgctctgtgattctctcaagtttacggatcggctgtgtggagctctgtgcgtaatcaggttcgatgaatatacaccagcagccgatagtgggaaacaaaccgaaaatgtccaagcagaaccgaatgctaatctcgctgaaaagaccgcagagcaaattattagcattctggacgataataagaaaaccgaatatacccgcctgcttgctgatgctattcgttcactccgccgctctagtaaacttgtcgctggcttgccaaaggatcatgacgggaaggatgaccattacctctgggatatcggcaagaagaagaaagacgaaaactctgtcactattaggcaaatccttacgacctcagcagacaccaaggaactcaagaatgccggaaaatggagagaattctgcgagaagctgggtgaagcgctgtacctcaagagtaaagacatgagtggcggcctgaaaattactcggagaatactgggcgatgctgaattccatggaaagcccgatcggcttgaaaagagccggtctgtgtcaatcggatctgtgttgaaagaaactgtggtatgcggcgaactggtcgctaaaacgcccttcttcttcggagcgatagacgaagatgcaaaacaaaccgacctgcaagtactcctcactcccgataacaagtatagactgccaagaagcgccgtgcgaggtatactccgtcgagatcttcaaacctattttgatagcccatgcaatgctgagttgggtggacggccatgcatgtgtaagacgtgtaggattatgagagggatcacggtgatggatgcgcgcagtgagtacaatgccccgccagaaataaggcatcgtacccgcattaatcccttcacaggcacggttgcggaaggtgccctgtttaatatggaagtagcccccgaggggattgtctttccatttcaactccggtaccggggctctgaagatgggctgcccgatgcactgaaaacggtgttgaaatggtgggctgaggggcaggcattcatgagtggcgctgcctcaaccgggaagggccgattccggatggaaaatgctaaatatgaaacgctggatctgagcgacgagaatcaaaggaatgactatcttaagaattggggatggcgtgacgagaaggggctcgaggaactgaagaaacgactgaactcaggtctgccagagcccggtaattatagggatccaaaatggcacgagattaacgtttccattgagatggcaagcccttttattaatggcgacccaatccgcgcagccgtggacaaacgtggtacagatgtggttaccttcgttaagtataaagctgaaggggaagaggcgaaacccgtatgtgcatacaaggccgaatcttttagaggggtgatcagaagtgccgtggcacgcattcatatggaagatggcgtccctttgactgagttgactcacagtgactgtgaatgtctcctgtgccaaatctttggaagtgagtatgaagccggcaaaataaggtttgaagatctcgtattcgaaagtgacccggaacctgtgaccttcgatcatgtggccatcgatagattcactggcggtgcagctgataagaagaaattcgatgattcccctctgcccggtagccctgcaagaccgctcatgttgaaaggctccttctggatccgcagggacgttctcgaggacgaagagtactgtaaggcactcggtaaggctcttgcagatgtgaataatggcctttatcccctcggtggaaagagcgccatcggctacggacaggtcaagagtctgggtataaagggagatgataagaggatttctcgcctcatgaatcctgcctttgatgagacagatgtagccgttccagaaaagcccaaaactgatgccgaggttcgcatcgaggcagagaaagtatattacccacactatttcgtcgaaccccataagaaggtggaacgcgaggagaaaccctgtggtcatcaaaagttccacgaggggcgactgacaggtaaaattcggtgtaagctcattaccaagacacccctcatcgtcccagatactagtaatgacgatttcttcagacctgcggataaagaagctcggaaggaaaaggacgaatatcataaatcatatgctttcttcagacttcataaacaaatcatgattcccgggagcgaattgagaggaatggtgagtagtgtctacgaaactgtgacaaattcttgcttcaggatatttgatgagactaaacggttgtcatggcggatggatgctgatcaccagaatgtgctgcaagactttctcccaggtcgagtgaccgccgatgggaaacatatacaaaagttttccgaaactgcaagggtgcctttctatgacaaaacgcagaaacattttgacattcttgatgagcaagaaattgctggtgagaaacctgttcggatgtgggtcaagcgttttattaaacgactgagcctcgttgatcctgctaaacacccccagaagaaacaagacaataaatggaaaagacgcaaagaaggcatcgccacatttatagagcaaaagaatggctcttattattttaacgtggtcaccaataatggctgcacttctttccacttgtggcataaacctgacaattttgaccaggagaaactcgaaggcatacagaatggtgagaaactggattgctgggtaagagatagtagataccaaaaggcctttcaagagatacccgagaacgacccagacggatgggagtgtaaagagggctaccttcatgtcgtcggccccagcaaagtagagtttagtgacaagaaaggggatgtgatcaataactttcaaggaacactcccatcagttcccaacgactggaaaacaattaggacgaacgattttaagaataggaaaaggaagaatgaacctgtgttttgttgtgaggatgataagggcaattactataccatggctaaatattgcgaaaccttcttcttcgatctgaaggagaacgaggaatacgagatccccgagaaagcaagaatcaaatacaaagaactgctcagggtctataacaacaatcctcaagcagtgccggagagcgtatttcagtctagagttgcccgggaaaacgtggaaaagctgaagtccggagatcttgtgtatttcaaacataatgaaaagtacgtagaggacatcgtcccagtgcggatttcccgaactgtagacgataggatgatcggcaaacgtatgagcgccgatctgcggccgtgccatggagattgggtggaagatggtgatctcagtgccttgaatgcatatcccgagaaaagactcctcttgcgccaccccaaaggactctgccctgcttgccggctctttggaaccggatcttacaagggcagagtcaggtttggattcgcgtcactcgaaaacgatccggagtggctgatcccaggcaagaatcccggcgatccgtttcacggcgggccggtgatgctctcattgttggaacggcctcgcccgacttggagtataccgggatccgacaataagtttaaagtgcctggcagaaagttttacgtccaccaccacgcctggaaaaccattaaggacgggaaccatcccacaacaggcaaagctattgaacaaagccctaataaccgcactgtagaagctctcgccggcgggaattcctttagcttcgaaattgcctttgagaacctgaaagaatgggagctgggtttgctcatccacagcctgcaactcgaaaagggtctggcgcataaacttggaatggcaaagtctatgggatttggttcagttgaaattgacgtcgaatcagtgcgcctgagaaaagattggaagcaatggcggaatggcaattccgaaattcccaactggttgggaaaaggatttgctaaactgaaggaatggttccgggacgagctcgattttatagaaaatcttaagaaacttctttggtttcctgagggcgaccaagcaccccgggtttgctaccccatgctgcgaaagaaggacgatcctaatgggaatagcggttacgaagaactcaaagacggggaattcaagaaagaagatcggcagaagaagctgaccacgccgtggacaccgtgggcaatgtccctgtacgatgacctaggagtggagaccagtgactcaaaaacagaaggctggtccaaaaacttcaaacttctgcagtctcagcttcaggtgaagaaggcagctctcactcaggcaaagagccaaaggacgaaacaaagtacagtcctcgccccagtcattgacctgaagcgaggtggctcctcagatgaccggcaaattgtggacactccaccgcatgtagcagctgggctgaaggatcctgttcccagtgggttttctgcaggggaagttctgattcccttagctgacgaatatgaccctatgtttcctaatgattatgagaaagtagtgaagcgccaaagagaggaacgacagagacagcgggagctggaaagacaaaaggaaatagaagaaagggaaaaaaggcgtaaagacagacatgaagcaagtgggtttgcaaggagaccagatccagattctgatgaagatgaagattatgagcgagagaggaggaaaagaagtatgggcggagctgccattgccccacccacttctctggtagagaaagacaaagagttaccccgagattttccttatgaagaggactcaagacctcgatcacagtcttccaaagcagccattcctcccccagtgtacgaggaacaagacagaccgagatctccaaccggacctagcaactccttcctcgctaacatggggggcacggtggcgcacaagatcatgcagaagtacggcttccgggagggccagggtctggggaagcatgagcagggcctgagcactgccttgtcagtggagaagaccagcaagcgtggcggcaagatcatcgtgggcgacgccacagagaaagatgcatccaagaagtcagattcaaatccgctgactgaaatacttaagtgtcctactaaagtggtcttactaaggaacatggttggtgcgggagaggtggatgaagacttggaagttgaaaccaaggaagaatgtgaaaaatatggcaaagttggaaaatgtgtgatatttgaaattcctggtgcccctgatgatgaagcagtacggatatttttagaatttgagagagttgaatcagcaattaaagcggttgttgacttgaatgggaggtattttggtggacgggtggtaaaagcatgtttctacaatttggacaaattcagggtcttggatttggcagaacaagttaaacggacagccgacggaagcgagttcgagtcaccaaagaagaagcggaaagtc

SEQ ID NO: 572 - DNA, 6159 bp, synthetic construct
  source 1..6159: mol_type = other DNA
atgaaacggacagccgacggaagcgagttcgagtcaccaaagaagaagcggaaagtcacgactactatgaagatttcaattgaattcctcgagccgtttcggatgaccaaatggcaggaaagcactaggcgaaacaagaacaacaaggaatttgttcgcggccaagcttttgcaagatggcatagaaataagaaggataacacaaaagggcggccttacataactgggacattgctgcggtccgcagtaattagaagcgcggaaaacctgctgacattgagtgatgggaaaattagcgaaaagacatgttgtcctgggaaatttgatacggaagataaagacaggttgctgcaattgaggcagcggtccacccttcgttggaccgataagaacccctgtccagataacgctgaaacttactgcccgttttgcgaacttctcgggagatccggtaacgatggaaagaaggctgagaagaaggattggcgctttcgtattcattttggcaatctttcccttccagggaagcccgatttcgacgggccaaaagctataggcagccaacgggtacttaacagggtcgatttcaaatccggtaaggcccatgacttctttaaggcttacgaagtcgaccatactaggtttccccgcttcgaaggggagattaccatagataataaagtcagcgctgaagccaggaaactgctctgtgattctctcaagtttacggatcggctgtgtggagctctgtgcgtaatcaggttcgatgaatatacaccagcagccgatagtgggaaacaaaccgaaaatgtccaagcagaaccgaatgctaatctcgctgaaaagaccgcagagcaaattattagcattctggacgataataagaaaaccgaatatacccgcctgcttgctgatgctattcgttcactccgccgctctagtaaacttgtcgctggcttgccaaaggatcatgacgggaaggatgaccattacctctgggatatcggcaagaagaagaaagacgaaaactctgtcactattaggcaaatccttacgacctcagcagacaccaaggaactcaagaatgccggaaaatggagagaattctgcgagaagctgggtgaagcgctgtacctcaagagtaaagacatgagtggcggcctgaaaattactcggagaatactgggcgatgctgaattccatggaaagcccgatcggcttgaaaagagccggtctgtgtcaatcggatctgtgttgaaagaaactgtggtatgcggcgaactggtcgctaaaacgcccttcttcttcggagcgatagacgaagatgcaaaacaaaccgacctgcaagtactcctcactcccgataacaagtatagactgccaagaagcgccgtgcgaggtatactccgtcgagatcttcaaacctattttgatagcccatgcaatgctgagttgggtggacggccatgcatgtgtaagacgtgtaggattatgagagggatcacggtgatggatgcgcgcagtgagtacaatgccccgccagaaataaggcatcgtacccgcattaatcccttcacaggcacggttgcggaaggtgccctgtttaatatggaagtagcccccgaggggattgtctttccatttcaactccggtaccggggctctgaagatgggctgcccgatgcactgaaaacggtgttgaaatggtgggctgaggggcaggcattcatgagtggcgctgcctcaaccgggaagggccgattccggatggaaaatgctaaatatgaaacgctggatctgagcgacgagaatcaaaggaatgactatcttaagaattggggatggcgtgacgagaaggggctcgaggaactgaagaaacgactgaactcaggtctgccagagcccggtaattatagggatccaaaatggcacgagattaacgtttccattgagatggcaagcccttttattaatggcgacccaatccgcgcagccgtggacaaacgtggtacagatgtggttaccttcgttaagtataaagctgaaggggaagaggcgaaacccgtatgtgcatacaaggccgaatcttttagaggggtgatcagaagtgccgtggcacgcattcatatggaagatggcgtccctttgactgagttgactcacagtgactgtgaatgtctcctgtgccaaatctttggaagtgagtatgaagccggcaaaataaggtttgaagatctcgtattcgaaagtgacccggaacctgtgaccttcgatcatgtggccatcgatagattcactggcggtgcagctgataagaagaaattcgatgattcccctctgcccggtagccctgcaagaccgctcatgttgaaaggctccttctggatccgcagggacgttctcgaggacgaagagtactgtaaggcactcggtaaggctcttgcagatgtgaataatggcctttatcccctcggtggaaagagcgccatcggctacggacaggtcaagagtctgggtataaagggagatgataagaggatttctcgcctcatgaatcctgcctttgatgagacagatgtagccgttccagaaaagcccaaaactgatgccgaggttcgcatcgaggcagagaaagtatattacccacactatttcgtcgaaccccataagaaggtggaacgcgaggagaaaccctgtggtcatcaaaagttccacgaggggcgactgacaggtaaaattcggtgtaagctcattaccaagacacccctcatcgtcccagatactagtaatgacgatttcttcagacctgcggataaagaagctcggaaggaaaaggacgaatatcataaatcatatgctttcttcagacttcataaacaaatcatgattcccgggagcgaattgagaggaatggtgagtagtgtctacgaaactgtgacaaattcttgcttcaggatatttgatgagactaaacggttgtcatggcggatggatgctgatcaccagaatgtgctgcaagactttctcccaggtcgagtgaccgccgatgggaaacatatacaaaagttttccgaaactgcaagggtgcctttctatgacaaaacgcagaaacattttgacattcttgatgagcaagaaattgctggtgagaaacctgttcggatgtgggtcaagcgttttattaaacgactgagcctcgttgatcctgctaaacacccccagaagaaacaagacaataaatggaaaagacgcaaagaaggcatcgccacatttatagagcaaaagaatggctcttattattttaacgtggtcaccaataatggctgcacttctttccacttgtggcataaacctgacaattttgaccaggagaaactcgaaggcatacagaatggtgagaaactggattgctgggtaagagatagtagataccaaaaggcctttcaagagatacccgagaacgacccagacggatgggagtgtaaagagggctaccttcatgtcgtcggccccagcaaagtagagtttagtgacaagaaaggggatgtgatcaataactttcaaggaacactcccatcagttcccaacgactggaaaacaattaggacgaacgattttaagaataggaaaaggaagaatgaacctgtgttttgttgtgaggatgataagggcaattactataccatggctaaatattgcgaaaccttcttcttcgatctgaaggagaacgaggaatacgagatccccgagaaagcaagaatcaaatacaaagaactgctcagggtctataacaacaatcctcaagcagtgccggagagcgtatttcagtctagagttgcccgggaaaacgtggaaaagctgaagtccggagatcttgtgtatttcaaacataatgaaaagtacgtagaggacatcgtcccagtgcggatttcccgaactgtagacgataggatgatcggcaaacgtatgagcgccgatctgcggccgtgccatggagattgggtggaagatggtgatctcagtgccttgaatgcatatcccgagaaaagactcctcttgcgccaccccaaaggactctgccctgcttgccggctctttggaaccggatcttacaagggcagagtcaggtttggattcgcgtcactcgaaaacgatccggagtggctgatcccaggcaagaatcccggcgatccgtttcacggcgggccggtgatgctctcattgttggaacggcctcgcccgacttggagtataccgggatccgacaataagtttaaagtgcctggcagaaagttttacgtccaccaccacgcctggaaaaccattaaggacgggaaccatcccacaacaggcaaagctattgaacaaagccctaataaccgcactgtagaagctctcgccggcgggaattcctttagcttcgaaattgcctttgagaacctgaaagaatgggagctgggtttgctcatccacagcctgcaactcgaaaagggtctggcgcataaacttggaatggcaaagtctatgggatttggttcagttgaaattgacgtcgaatcagtgcgcctgagaaaagattggaagcaatggcggaatggcaattccgaaattcccaactggttgggaaaaggatttgctaaactgaaggaatggttccgggacgagctcgattttatagaaaatcttaagaaacttctttggtttcctgagggcgaccaagcaccccgggtttgctaccccatgctgcgaaagaaggacgatcctaatgggaatagcggttacgaagaactcaaagacggggaattcaagaaagaagatcggcagaagaagctgaccacgccgtggacaccgtgggcatctggcagcgagacaccaggaacaagcgagtcagcaacaccagagagctccctgtacgatgacctaggagtggagaccagtgactcaaaaacagaaggctggtccaaaaacttcaaacttctgcagtctcagcttcaggtgaagaaggcagctctcactcaggcaaagagccaaaggacgaaacaaagtacagtcctcgccccagtcattgacctgaagcgaggtggctcctcagatgaccggcaaattgtggacactccaccgcatgtagcagctgggctgaaggatcctgttcccagtgggttttctgcaggggaagttctgattcccttagctgacgaatatgaccctatgtttcctaatgattatgagaaagtagtgaagcgccaaagagaggaacgacagagacagcgggagctggaaagacaaaaggaaatagaagaaagggaaaaaaggcgtaaagacagacatgaagcaagtgggtttgcaaggagaccagatccagattctgatgaagatgaagattatgagcgagagaggaggaaaagaagtatgggcggagctgccattgccccacccacttctctggtagagaaagacaaagagttaccccgagattttccttatgaagaggactcaagacctcgatcacagtcttccaaagcagccattcctcccccagtgtacgaggaacaagacagaccgagatctccaaccggacctagcaactccttcctcgctaacatggggggcacggtggcgcacaagatcatgcagaagtacggcttccgggagggccagggtctggggaagcatgagcagggcctgagcactgccttgtcagtggagaagaccagcaagcgtggcggcaagatcatcgtgggcgacgccacagagaaagatgcatccaagaagtcagattcaaatccgctgactgaaatacttaagtgtcctactaaagtggtcttactaaggaacatggttggtgcgggagaggtggatgaagacttggaagttgaaaccaaggaagaatgtgaaaaatatggcaaagttggaaaatgtgtgatatttgaaattcctggtgcccctgatgatgaagcagtacggatatttttagaatttgagagagttgaatcagcaattaaagcggttgttgacttgaatgggaggtattttggtggacgggtggtaaaagcatgtttctacaatttggacaaattcagggtcttggatttggcagaacaagttaaacggacagccgacggaagcgagttcgagtcaccaaagaagaagcggaaagtc

SEQ ID NO: 573 - DNA, 5286 bp, synthetic construct
  source 1..5286: mol_type = other DNA
atgaaacggacagccgacggaagcgagttcgagtcaccaaagaagaagcggaaagtcatggcgatgcaagcggccaagagggcgaacattcgacttccacctgaagtaaatcggatattgtatataagaaatttgccatacaaaatcacagctgaagaaatgtatgatatatttgggaaatatggacctattcgtcaaatcagagtggggaacacacctgaaactagaggaacagcttatgtggtctatgaggacatctttgatgccaagaatgcatgtgatcacctatcgggattcaatgtttgtaacagataccttgtggttttgtactataatgccaacagggcatttcagaagatggacacaaagaagaaggaggaacagttgaagcttctcaaggagaaatatggcatcaacacagatccaccaaaaacgactactatgaagatttcaattgaattcctcgagccgtttcggatgaccaaatggcaggaaagcactaggcgaaacaagaacaacaaggaatttgttcgcggccaagcttttgcaagatggcatagaaataagaaggataacacaaaagggcggccttacataactgggacattgctgcggtccgcagtaattagaagcgcggaaaacctgctgacattgagtgatgggaaaattagcgaaaagacatgttgtcctgggaaatttgatacggaagataaagacaggttgctgcaattgaggcagcggtccacccttcgttggaccgataagaacccctgtccagataacgctgaaacttactgcccgttttgcgaacttctcgggagatccggtaacgatggaaagaaggctgagaagaaggattggcgctttcgtattcattttggcaatctttcccttccagggaagcccgatttcgacgggccaaaagctataggcagccaacgggtacttaacagggtcgatttcaaatccggtaaggcccatgacttctttaaggcttacgaagtcgaccatactaggtttccccgcttcgaaggggagattaccatagataataaagtcagcgctgaagccaggaaactgctctgtgattctctcaagtttacggatcggctgtgtggagctctgtgcgtaatcaggttcgatgaatatacaccagcagccgatagtgggaaacaaaccgaaaatgtccaagcagaaccgaatgctaatctcgctgaaaagaccgcagagcaaattattagcattctggacgataataagaaaaccgaatatacccgcctgcttgctgatgctattcgttcactccgccgctctagtaaacttgtcgctggcttgccaaaggatcatgacgggaaggatgaccattacctctgggatatcggcaagaagaagaaagacgaaaactctgtcactattaggcaaatccttacgacctcagcagacaccaaggaactcaagaatgccggaaaatggagagaattctgcgagaagctgggtgaagcgctgtacctcaagagtaaagacatgagtggcggcctgaaaattactcggagaatactgggcgatgctgaattccatggaaagcccgatcggcttgaaaagagccggtctgtgtcaatcggatctgtgttgaaagaaactgtggtatgcggcgaactggtcgctaaaacgcccttcttcttcggagcgatagacgaagatgcaaaacaaaccgacctgcaagtactcctcactcccgataacaagtatagactgccaagaagcgccgtgcgaggtatactccgtcgagatcttcaaacctattttgatagcccatgcaatgctgagttgggtggacggccatgcatgtgtaagacgtgtaggattatgagagggatcacggtgatggatgcgcgcagtgagtacaatgccccgccagaaataaggcatcgtacccgcattaatcccttcacaggcacggttgcggaaggtgccctgtttaatatggaagtagcccccgaggggattgtctttccatttcaactccggtaccggggctctgaagatgggctgcccgatgcactgaaaacggtgttgaaatggtgggctgaggggcaggcattcatgagtggcgctgcctcaaccgggaagggccgattccggatggaaaatgctaaatatgaaacgctggatctgagcgacgagaatcaaaggaatgactatcttaagaattggggatggcgtgacgagaaggggctcgaggaactgaagaaacgactgaactcaggtctgccagagcccggtaattatagggatccaaaatggcacgagattaacgtttccattgagatggcaagcccttttattaatggcgacccaatccgcgcagccgtggacaaacgtggtacagatgtggttaccttcgttaagtataaagctgaaggggaagaggcgaaacccgtatgtgcatacaaggccgaatcttttagaggggtgatcagaagtgccgtggcacgcattcatatggaagatggcgtccctttgactgagttgactcacagtgactgtgaatgtctcctgtgccaaatctttggaagtgagtatgaagccggcaaaataaggtttgaagatctcgtattcgaaagtgacccggaacctgtgaccttcgatcatgtggccatcgatagattcactggcggtgcagctgataagaagaaattcgatgattcccctctgcccggtagccctgcaagaccgctcatgttgaaaggctccttctggatccgcagggacgttctcgaggacgaagagtactgtaaggcactcggtaaggctcttgcagatgtgaataatggcctttatcccctcggtggaaagagcgccatcggctacggacaggtcaagagtctgggtataaagggagatgataagaggatttctcgcctcatgaatcctgcctttgatgagacagatgtagccgttccagaaaagcccaaaactgatgccgaggttcgcatcgaggcagagaaagtatattacccacactatttcgtcgaaccccataagaaggtggaacgcgaggagaaaccctgtggtcatcaaaagttccacgaggggcgactgacaggtaaaattcggtgtaagctcattaccaagacacccctcatcgtcccagatactagtaatgacgatttcttcagacctgcggataaagaagctcggaaggaaaaggacgaatatcataaatcatatgctttcttcagacttcataaacaaatcatgattcccgggagcgaattgagaggaatggtgagtagtgtctacgaaactgtgacaaattcttgcttcaggatatttgatgagactaaacggttgtcatggcggatggatgctgatcaccagaatgtgctgcaagactttctcccaggtcgagtgaccgccgatgggaaacatatacaaaagttttccgaaactgcaagggtgcctttctatgacaaaacgcagaaacattttgacattcttgatgagcaagaaattgctggtgagaaacctgttcggatgtgggtcaagcgttttattaaacgactgagcctcgttgatcctgctaaacacccccagaagaaacaagacaataaatggaaaagacgcaaagaaggcatcgccacatttatagagcaaaagaatggctcttattattttaacgtggtcaccaataatggctgcacttctttccacttgtggcataaacctgacaattttgaccaggagaaactcgaaggcatacagaatggtgagaaactggattgctgggtaagagatagtagataccaaaaggcctttcaagagatacccgagaacgacccagacggatgggagtgtaaagagggctaccttcatgtcgtcggccccagcaaagtagagtttagtgacaagaaaggggatgtgatcaataactttcaaggaacactcccatcagttcccaacgactggaaaacaattaggacgaacgattttaagaataggaaaaggaagaatgaacctgtgttttgttgtgaggatgataagggcaattactataccatggctaaatattgcgaaaccttcttcttcgatctgaaggagaacgaggaatacgagatccccgagaaagcaagaatcaaatacaaagaactgctcagggtctataacaacaatcctcaagcagtgccggagagcgtatttcagtctagagttgcccgggaaaacgtggaaaagctgaagtccggagatcttgtgtatttcaaacataatgaaaagtacgtagaggacatcgtcccagtgcggatttcccgaactgtagacgataggatgatcggcaaacgtatgagcgccgatctgcggccgtgccatggagattgggtggaagatggtgatctcagtgccttgaatgcatatcccgagaaaagactcctcttgcgccaccccaaaggactctgccctgcttgccggctctttggaaccggatcttacaagggcagagtcaggtttggattcgcgtcactcgaaaacgatccggagtggctgatcccaggcaagaatcccggcgatccgtttcacggcgggccggtgatgctctcattgttggaacggcctcgcccgacttggagtataccgggatccgacaataagtttaaagtgcctggcagaaagttttacgtccaccaccacgcctggaaaaccattaaggacgggaaccatcccacaacaggcaaagctattgaacaaagccctaataaccgcactgtagaagctctcgccggcgggaattcctttagcttcgaaattgcctttgagaacctgaaagaatgggagctgggtttgctcatccacagcctgcaactcgaaaagggtctggcgcataaacttggaatggcaaagtctatgggatttggttcagttgaaattgacgtcgaatcagtgcgcctgagaaaagattggaagcaatggcggaatggcaattccgaaattcccaactggttgggaaaaggatttgctaaactgaaggaatggttccgggacgagctcgattttatagaaaatcttaagaaacttctttggtttcctgagggcgaccaagcaccccgggtttgctaccccatgctgcgaaagaaggacgatcctaatgggaatagcggttacgaagaactcaaagacggggaattcaagaaagaagatcggcagaagaagctgaccacgccgtggacaccgtgggcaaaacggacagccgacggaagcgagttcgagtcaccaaagaagaagcggaaagtc

SEQ ID NO: 574 - DNA, 5331 bp, synthetic construct
  source 1..5331: mol_type = other DNA
atgaaacggacagccgacggaagcgagttcgagtcaccaaagaagaagcggaaagtcacgactactatgaagatttcaattgaattcctcgagccgtttcggatgaccaaatggcaggaaagcactaggcgaaacaagaacaacaaggaatttgttcgcggccaagcttttgcaagatggcatagaaataagaaggataacacaaaagggcggccttacataactgggacattgctgcggtccgcagtaattagaagcgcggaaaacctgctgacattgagtgatgggaaaattagcgaaaagacatgttgtcctgggaaatttgatacggaagataaagacaggttgctgcaattgaggcagcggtccacccttcgttggaccgataagaacccctgtccagataacgctgaaacttactgcccgttttgcgaacttctcgggagatccggtaacgatggaaagaaggctgagaagaaggattggcgctttcgtattcattttggcaatctttcccttccagggaagcccgatttcgacgggccaaaagctataggcagccaacgggtacttaacagggtcgatttcaaatccggtaaggcccatgacttctttaaggcttacgaagtcgaccatactaggtttccccgcttcgaaggggagattaccatagataataaagtcagcgctgaagccaggaaactgctctgtgattctctcaagtttacggatcggctgtgtggagctctgtgcgtaatcaggttcgatgaatatacaccagcagccgatagtgggaaacaaaccgaaaatgtccaagcagaaccgaatgctaatctcgctgaaaagaccgcagagcaaattattagcattctggacgataataagaaaaccgaatatacccgcctgcttgctgatgctattcgttcactccgccgctctagtaaacttgtcgctggcttgccaaaggatcatgacgggaaggatgaccattacctctgggatatcggcaagaagaagaaagacgaaaactctgtcactattaggcaaatccttacgacctcagcagacaccaaggaactcaagaatgccggaaaatggagagaattctgcgagaagctgggtgaagcgctgtacctcaagagtaaagacatgagtggcggcctgaaaattactcggagaatactgggcgatgctgaattccatggaaagcccgatcggcttgaaaagagccggtctgtgtcaatcggatctgtgttgaaagaaactgtggtatgcggcgaactggtcgctaaaacgcccttcttcttcggagcgatagacgaagatgcaaaacaaaccgacctgcaagtactcctcactcccgataacaagtatagactgccaagaagcgccgtgcgaggtatactccgtcgagatcttcaaacctattttgatagcccatgcaatgctgagttgggtggacggccatgcatgtgtaagacgtgtaggattatgagagggatcacggtgatggatgcgcgcagtgagtacaatgccccgccagaaataaggcatcgtacccgcattaatcccttcacaggcacggttgcggaaggtgccctgtttaatatggaagtagcccccgaggggattgtctttccatttcaactccggtaccggggctctgaagatgggctgcccgatgcactgaaaacggtgttgaaatggtgggctgaggggcaggcattcatgagtggcgctgcctcaaccgggaagggccgattccggatggaaaatgctaaatatgaaacgctggatctgagcgacgagaatcaaaggaatgactatcttaagaattggggatggcgtgacgagaaggggctcgaggaactgaagaaacgactgaactcaggtctgccagagcccggtaattatagggatccaaaatggcacgagattaacgtttccattgagatggcaagcccttttattaatggcgacccaatccgcgcagccgtggacaaacgtggtacagatgtggttaccttcgttaagtataaagctgaaggggaagaggcgaaacccgtatgtgcatacaaggccgaatcttttagaggggtgatcagaagtgccgtggcacgcattcatatggaagatggcgtccctttgactgagttgactcacagtgactgtgaatgtctcctgtgccaaatctttggaagtgagtatgaagccggcaaaataaggtttgaagatctcgtattcgaaagtgacccggaacctgtgaccttcgatcatgtggccatcgatagattcactggcggtgcagctgataagaagaaattcgatgattcccctctgcccggtagccctgcaagaccgctcatgttgaaaggctccttctggatccgcagggacgttctcgaggacgaagagtactgtaaggcactcggtaaggctcttgcagatgtgaataatggcctttatcccctcggtggaaagagcgccatcggctacggacaggtcaagagtctgggtataaagggagatgataagaggatttctcgcctcatgaatcctgcctttgatgagacagatgtagccgttccagaaaagcccaaaactgatgccgaggttcgcatcgaggcagagaaagtatattacccacactatttcgtcgaaccccataagaaggtggaacgcgaggagaaaccctgtggtcatcaaaagttccacgaggggcgactgacaggtaaaattcggtgtaagctcattaccaagacacccctcatcgtcccagatactagtaatgacgatttcttcagacctgcggataaagaagctcggaaggaaaaggacgaatatcataaatcatatgctttcttcagacttcataaacaaatcatgattcccgggagcgaattgagaggaatggtgagtagtgtctacgaaactgtgacaaattcttgcttcaggatatttgatgagactaaacggttgtcatggcggatggatgctgatcaccagaatgtgctgcaagactttctcccaggtcgagtgaccgccgatgggaaacatatacaaaagttttccgaaactgcaagggtgcctttctatgacaaaacgcagaaacattttgacattcttgatgagcaagaaattgctggtgagaaacctgttcggatgtgggtcaagcgttttattaaacgactgagcctcgttgatcctgctaaacacccccagaagaaacaagacaataaatggaaaagacgcaaagaaggcatcgccacatttatagagcaaaagaatggctcttattattttaacgtggtcaccaataatggctgcacttctttccacttgtggcataaacctgacaattttgaccaggagaaactcgaaggcatacagaatggtgagaaactggattgctgggtaagagatagtagataccaaaaggcctttcaagagatacccgagaacgacccagacggatgggagtgtaaagagggctaccttcatgtcgtcggccccagcaaagtagagtttagtgacaagaaaggggatgtgatcaataactttcaaggaacactcccatcagttcccaacgactggaaaacaattaggacgaacgattttaagaataggaaaaggaagaatgaacctgtgttttgttgtgaggatgataagggcaattactataccatggctaaatattgcgaaaccttcttcttcgatctgaaggagaacgaggaatacgagatccccgagaaagcaagaatcaaatacaaagaactgctcagggtctataacaacaatcctcaagcagtgccggagagcgtatttcagtctagagttgcccgggaaaacgtggaaaagctgaagtccggagatcttgtgtatttcaaacataatgaaaagtacgtagaggacatcgtcccagtgcggatttcccgaactgtagacgataggatgatcggcaaacgtatgagcgccgatctgcggccgtgccatggagattgggtggaagatggtgatctcagtgccttgaatgcatatcccgagaaaagactcctcttgcgccaccccaaaggactctgccctgcttgccggctctttggaaccggatcttacaagggcagagtcaggtttggattcgcgtcactcgaaaacgatccggagtggctgatcccaggcaagaatcccggcgatccgtttcacggcgggccggtgatgctctcattgttggaacggcctcgcccgacttggagtataccgggatccgacaataagtttaaagtgcctggcagaaagttttacgtccaccaccacgcctggaaaaccattaaggacgggaaccatcccacaacaggcaaagctattgaacaaagccctaataaccgcactgtagaagctctcgccggcgggaattcctttagcttcgaaattgcctttgagaacctgaaagaatgggagctgggtttgctcatccacagcctgcaactcgaaaagggtctggcgcataaacttggaatggcaaagtctatgggatttggttcagttgaaattgacgtcgaatcagtgcgcctgagaaaagattggaagcaatggcggaatggcaattccgaaattcccaactggttgggaaaaggatttgctaaactgaaggaatggttccgggacgagctcgattttatagaaaatcttaagaaacttctttggtttcctgagggcgaccaagcaccccgggtttgctaccccatgctgcgaaagaaggacgatcctaatgggaatagcggttacgaagaactcaaagacggggaattcaagaaagaagatcggcagaagaagctgaccacgccgtggacaccgtgggcatctggcagcgagacaccaggaacaagcgagtcagcaacaccagagagcgcgatgcaagcggccaagagggcgaacattcgacttccacctgaagtaaatcggatattgtatataagaaatttgccatacaaaatcacagctgaagaaatgtatgatatatttgggaaatatggacctattcgtcaaatcagagtggggaacacacctgaaactagaggaacagcttatgtggtctatgaggacatctttgatgccaagaatgcatgtgatcacctatcgggattcaatgtttgtaacagataccttgtggttttgtactataatgccaacagggcatttcagaagatggacacaaagaagaaggaggaacagttgaagcttctcaaggagaaatatggcatcaacacagatccaccaaaaaaacggacagccgacggaagcgagttcgagtcaccaaagaagaagcggaaagtc

SEQ ID NO: 575 - DNA, 5631 bp, synthetic construct
  source 1..5631: mol_type = other DNA
atgaaacggacagccgacggaagcgagttcgagtcaccaaagaagaagcggaaagtcatggcggagtatctggcctccatcttcggcaccgagaaagacaaagtcaactgttcattttatttcaaaattggagcatgtcgtcatggagacaggtgctctcggttgcacaataaaccgacgtttagccagaccattgccctcttgaacatttaccgtaaccctcaaaactcttcccagtctgctgacggtttgcgctgtgccgtgagcgatgtggagatgcaggaacactatgatgagttttttgaggaggtttttacagaaatggaggagaagtatggggaagtagaggagatgaacgtctgtgacaacctgggagaccacctggtggggaacgtgtacgtcaagtttcgccgtgaggaagatgcggaaaaggctgtgattgacttgaataaccgttggtttaatggacagccgatccacgccgagctgtcacccgtgacggacttcagagaagcctgctgccgtcagtatgagatgggagaatgcacacgaggcggcttctgcaacttcatgcatttgaagcccatttccagagagctgcggcgggagctgtatggccgccgtcgcaagaagcatagatcaagatcccgatcccgggagcgtcgttctcggtctagagaccgtggtcgtggcggtggcggtggcggtggtggaggtggcggcggacgggagcgtgacaggaggcggtcgagagatcgtgaaagatctgggcgattcacgactactatgaagatttcaattgaattcctcgagccgtttcggatgaccaaatggcaggaaagcactaggcgaaacaagaacaacaaggaatttgttcgcggccaagcttttgcaagatggcatagaaataagaaggataacacaaaagggcggccttacataactgggacattgctgcggtccgcagtaattagaagcgcggaaaacctgctgacattgagtgatgggaaaattagcgaaaagacatgttgtcctgggaaatttgatacggaagataaagacaggttgctgcaattgaggcagcggtccacccttcgttggaccgataagaacccctgtccagataacgctgaaacttactgcccgttttgcgaacttctcgggagatccggtaacgatggaaagaaggctgagaagaaggattggcgctttcgtattcattttggcaatctttcccttccagggaagcccgatttcgacgggccaaaagctataggcagccaacgggtacttaacagggtcgatttcaaatccggtaaggcccatgacttctttaaggcttacgaagtcgaccatactaggtttccccgcttcgaaggggagattaccatagataataaagtcagcgctgaagccaggaaactgctctgtgattctctcaagtttacggatcggctgtgtggagctctgtgcgtaatcaggttcgatgaatatacaccagcagccgatagtgggaaacaaaccgaaaatgtccaagcagaaccgaatgctaatctcgctgaaaagaccgcagagcaaattattagcattctggacgataataagaaaaccgaatatacccgcctgcttgctgatgctattcgttcactccgccgctctagtaaacttgtcgctggcttgccaaaggatcatgacgggaaggatgaccattacctctgggatatcggcaagaagaagaaagacgaaaactctgtcactattaggcaaatccttacgacctcagcagacaccaaggaactcaagaatgccggaaaatggagagaattctgcgagaagctgggtgaagcgctgtacctcaagagtaaagacatgagtggcggcctgaaaattactcggagaatactgggcgatgctgaattccatggaaagcccgatcggcttgaaaagagccggtctgtgtcaatcggatctgtgttgaaagaaactgtggtatgcggcgaactggtcgctaaaacgcccttcttcttcggagcgatagacgaagatgcaaaacaaaccgacctgcaagtactcctcactcccgataacaagtatagactgccaagaagcgccgtgcgaggtatactccgtcgagatcttcaaacctattttgatagcccatgcaatgctgagttgggtggacggccatgcatgtgtaagacgtgtaggattatgagagggatcacggtgatggatgcgcgcagtgagtacaatgccccgccagaaataaggcatcgtacccgcattaatcccttcacaggcacggttgcggaaggtgccctgtttaatatggaagtagcccccgaggggattgtctttccatttcaactccggtaccggggctctgaagatgggctgcccgatgcactgaaaacggtgttgaaatggtgggctgaggggcaggcattcatgagtggcgctgcctcaaccgggaagggccgattccggatggaaaatgctaaatatgaaacgctggatctgagcgacgagaatcaaaggaatgactatcttaagaattggggatggcgtgacgagaaggggctcgaggaactgaagaaacgactgaactcaggtctgccagagcccggtaattatagggatccaaaatggcacgagattaacgtttccattgagatggcaagcccttttattaatggcgacccaatccgcgcagccgtggacaaacgtggtacagatgtggttaccttcgttaagtataaagctgaaggggaagaggcgaaacccgtatgtgcatacaaggccgaatcttttagaggggtgatcagaagtgccgtggcacgcattcatatggaagatggcgtccctttgactgagttgactcacagtgactgtgaatgtctcctgtgccaaatctttggaagtgagtatgaagccggcaaaataaggtttgaagatctcgtattcgaaagtgacccggaacctgtgaccttcgatcatgtggccatcgatagattcactggcggtgcagctgataagaagaaattcgatgattcccctctgcccggtagccctgcaagaccgctcatgttgaaaggctccttctggatccgcagggacgttctcgaggacgaagagtactgtaaggcactcggtaaggctcttgcagatgtgaataatggcctttatcccctcggtggaaagagcgccatcggctacggacaggtcaagagtctgggtataaagggagatgataagaggatttctcgcctcatgaatcctgcctttgatgagacagatgtagccgttccagaaaagcccaaaactgatgccgaggttcgcatcgaggcagagaaagtatattacccacactatttcgtcgaaccccataagaaggtggaacgcgaggagaaaccctgtggtcatcaaaagttccacgaggggcgactgacaggtaaaattcggtgtaagctcattaccaagacacccctcatcgtcccagatactagtaatgacgatttcttcagacctgcggataaagaagctcggaaggaaaaggacgaatatcataaatcatatgctttcttcagacttcataaacaaatcatgattcccgggagcgaattgagaggaatggtgagtagtgtctacgaaactgtgacaaattcttgcttcaggatatttgatgagactaaacggttgtcatggcggatggatgctgatcaccagaatgtgctgcaagactttctcccaggtcgagtgaccgccgatgggaaacatatacaaaagttttccgaaactgcaagggtgcctttctatgacaaaacgcagaaacattttgacattcttgatgagcaagaaattgctggtgagaaacctgttcggatgtgggtcaagcgttttattaaacgactgagcctcgttgatcctgctaaacacccccagaagaaacaagacaataaatggaaaagacgcaaagaaggcatcgccacatttatagagcaaaagaatggctcttattattttaacgtggtcaccaataatggctgcacttctttccacttgtggcataaacctgacaattttgaccaggagaaactcgaaggcatacagaatggtgagaaactggattgctgggtaagagatagtagataccaaaaggcctttcaagagatacccgagaacgacccagacggatgggagtgtaaagagggctaccttcatgtcgtcggccccagcaaagtagagtttagtgacaagaaaggggatgtgatcaataactttcaaggaacactcccatcagttcccaacgactggaaaacaattaggacgaacgattttaagaataggaaaaggaagaatgaacctgtgttttgttgtgaggatgataagggcaattactataccatggctaaatattgcgaaaccttcttcttcgatctgaaggagaacgaggaatacgagatccccgagaaagcaagaatcaaatacaaagaactgctcagggtctataacaacaatcctcaagcagtgccggagagcgtatttcagtctagagttgcccgggaaaacgtggaaaagctgaagtccggagatcttgtgtatttcaaacataatgaaaagtacgtagaggacatcgtcccagtgcggatttcccgaactgtagacgataggatgatcggcaaacgtatgagcgccgatctgcggccgtgccatggagattgggtggaagatggtgatctcagtgccttgaatgcatatcccgagaaaagactcctcttgcgccaccccaaaggactctgccctgcttgccggctctttggaaccggatcttacaagggcagagtcaggtttggattcgcgtcactcgaaaacgatccggagtggctgatcccaggcaagaatcccggcgatccgtttcacggcgggccggtgatgctctcattgttggaacggcctcgcccgacttggagtataccgggatccgacaataagtttaaagtgcctggcagaaagttttacgtccaccaccacgcctggaaaaccattaaggacgggaaccatcccacaacaggcaaagctattgaacaaagccctaataaccgcactgtagaagctctcgccggcgggaattcctttagcttcgaaattgcctttgagaacctgaaagaatgggagctgggtttgctcatccacagcctgcaactcgaaaagggtctggcgcataaacttggaatggcaaagtctatgggatttggttcagttgaaattgacgtcgaatcagtgcgcctgagaaaagattggaagcaatggcggaatggcaattccgaaattcccaactggttgggaaaaggatttgctaaactgaaggaatggttccgggacgagctcgattttatagaaaatcttaagaaacttctttggtttcctgagggcgaccaagcaccccgggtttgctaccccatgctgcgaaagaaggacgatcctaatgggaatagcggttacgaagaactcaaagacggggaattcaagaaagaagatcggcagaagaagctgaccacgccgtggacaccgtgggcaaaacggacagccgacggaagcgagttcgagtcaccaaagaagaagcggaaagtc

SEQ ID NO: 576 - DNA, 5631 bp, synthetic construct
  source 1..5631: mol_type = other DNA
atgaaacggacagccgacggaagcgagttcgagtcaccaaagaagaagcggaaagtcacgactactatgaagatttcaattgaattcctcgagccgtttcggatgaccaaatggcaggaaagcactaggcgaaacaagaacaacaaggaatttgttcgcggccaagcttttgcaagatggcatagaaataagaaggataacacaaaagggcggccttacataactgggacattgctgcggtccgcagtaattagaagcgcggaaaacctgctgacattgagtgatgggaaaattagcgaaaagacatgttgtcctgggaaatttgatacggaagataaagacaggttgctgcaattgaggcagcggtccacccttcgttggaccgataagaacccctgtccagataacgctgaaacttactgcccgttttgcgaacttctcgggagatccggtaacgatggaaagaaggctgagaagaaggattggcgctttcgtattcattttggcaatctttcccttccagggaagcccgatttcgacgggccaaaagctataggcagccaacgggtacttaacagggtcgatttcaaatccggtaaggcccatgacttctttaaggcttacgaagtcgaccatactaggtttccccgcttcgaaggggagattaccatagataataaagtcagcgctgaagccaggaaactgctctgtgattctctcaagtttacggatcggctgtgtggagctctgtgcgtaatcaggttcgatgaatatacaccagcagccgatagtgggaaacaaaccgaaaatgtccaagcagaaccgaatgctaatctcgctgaaaagaccgcagagcaaattattagcattctggacgataataagaaaaccgaatatacccgcctgcttgctgatgctattcgttcactccgccgctctagtaaacttgtcgctggcttgccaaaggatcatgacgggaaggatgaccattacctctgggatatcggcaagaagaagaaagacgaaaactctgtcactattaggcaaatccttacgacctcagcagacaccaaggaactcaagaatgccggaaaatggagagaattctgcgagaagctgggtgaagcgctgtacctcaagagtaaagacatgagtggcggcctgaaaattactcggagaatactgggcgatgctgaattccatggaaagcccgatcggcttgaaaagagccggtctgtgtcaatcggatctgtgttgaaagaaactgtggtatgcggcgaactggtcgctaaaacgcccttcttcttcggagcgatagacgaagatgcaaaacaaaccgacctgcaagtactcctcactcccgataacaagtatagactgccaagaagcgccgtgcgaggtatactccgtcgagatcttcaaacctattttgatagcccatgcaatgctgagttgggtggacggccatgcatgtgtaagacgtgtaggattatgagagggatcacggtgatggatgcgcgcagtgagtacaatgccccgccagaaataaggcatcgtacccgcattaatcccttcacaggcacggttgcggaaggtgccctgtttaatatggaagtagcccccgaggggattgtctttccatttcaactccggtaccggggctctgaagatgggctgcccgatgcactgaaaacggtgttgaaatggtgggctgaggggcaggcattcatgagtggcgctgcctcaaccgggaagggccgattccggatggaaaatgctaaatatgaaacgctggatctgagcgacgagaatcaaaggaatgactatcttaagaattggggatggcgtgacgagaaggggctcgaggaactgaagaaacgactgaactcaggtctgccagagcccggtaattatagggatccaaaatggcacgagattaacgtttccattgagatggcaagcccttttattaatggcgacccaatccgcgcagccgtggacaaacgtggtacagatgtggttaccttcgttaagtataaagctgaaggggaagaggcgaaacccgtatgtgcatacaaggccgaatcttttagaggggtgatcagaagtgccgtggcacgcattcatatggaagatggcgtccctttgactgagttgactcacagtgactgtgaatgtctcctgtgccaaatctttggaagtgagtatgaagccggcaaaataaggtttgaagatctcgtattcgaaagtgacccggaacctgtgaccttcgatcatgtggccatcgatagattcactggcggtgcagctgataagaagaaattcgatgattcccctctgcccggtagccctgcaagaccgctcatgttgaaaggctccttctggatccgcagggacgttctcgaggacgaagagtactgtaaggcactcggtaaggctcttgcagatgtgaataatggcctttatcccctcggtggaaagagcgccatcggctacggacaggtcaagagtctgggtataaagggagatgataagaggatttctcgcctcatgaatcctgcctttgatgagacagatgtagccgttccagaaaagcccaaaactgatgccgaggttcgcatcgaggcagagaaagtatattacccacactatttcgtcgaaccccataagaaggtggaacgcgaggagaaaccctgtggtcatcaaaagttccacgaggggcgactgacaggtaaaattcggtgtaagctcattaccaagacacccctcatcgtcccagatactagtaatgacgatttcttcagacctgcggataaagaagctcggaaggaaaaggacgaatatcataaatcatatgctttcttcagacttcataaacaaatcatgattcccgggagcgaattgagaggaatggtgagtagtgtctacgaaactgtgacaaattcttgcttcaggatatttgatgagactaaacggttgtcatggcggatggatgctgatcaccagaatgtgctgcaagactttctcccaggtcgagtgaccgccgatgggaaacatatacaaaagttttccgaaactgcaagggtgcctttctatgacaaaacgcagaaacattttgacattcttgatgagcaagaaattgctggtgagaaacctgttcggatgtgggtcaagcgttttattaaacgactgagcctcgttgatcctgctaaacacccccagaagaaacaagacaataaatggaaaagacgcaaagaaggcatcgccacatttatagagcaaaagaatggctcttattattttaacgtggtcaccaataatggctgcacttctttccacttgtggcataaacctgacaattttgaccaggagaaactcgaaggcatacagaatggtgagaaactggattgctgggtaagagatagtagataccaaaaggcctttcaagagatacccgagaacgacccagacggatgggagtgtaaagagggctaccttcatgtcgtcggccccagcaaagtagagtttagtgacaagaaaggggatgtgatcaataactttcaaggaacactcccatcagttcccaacgactggaaaacaattaggacgaacgattttaagaataggaaaaggaagaatgaacctgtgttttgttgtgaggatgataagggcaattactataccatggctaaatattgcgaaaccttcttcttcgatctgaaggagaacgaggaatacgagatccccgagaaagcaagaatcaaatacaaagaactgctcagggtctataacaacaatcctcaagcagtgccggagagcgtatttcagtctagagttgcccgggaaaacgtggaaaagctgaagtccggagatcttgtgtatttcaaacataatgaaaagtacgtagaggacatcgtcccagtgcggatttcccgaactgtagacgataggatgatcggcaaacgtatgagcgccgatctgcggccgtgccatggagattgggtggaagatggtgatctcagtgccttgaatgcatatcccgagaaaagactcctcttgcgccaccccaaaggactctgccctgcttgccggctctttggaaccggatcttacaagggcagagtcaggtttggattcgcgtcactcgaaaacgatccggagtggctgatcccaggcaagaatcccggcgatccgtttcacggcgggccggtgatgctctcattgttggaacggcctcgcccgacttggagtataccgggatccgacaataagtttaaagtgcctggcagaaagttttacgtccaccaccacgcctggaaaaccattaaggacgggaaccatcccacaacaggcaaagctattgaacaaagccctaataaccgcactgtagaagctctcgccggcgggaattcctttagcttcgaaattgcctttgagaacctgaaagaatgggagctgggtttgctcatccacagcctgcaactcgaaaagggtctggcgcataaacttggaatggcaaagtctatgggatttggttcagttgaaattgacgtcgaatcagtgcgcctgagaaaagattggaagcaatggcggaatggcaattccgaaattcccaactggttgggaaaaggatttgctaaactgaaggaatggttccgggacgagctcgattttatagaaaatcttaagaaacttctttggtttcctgagggcgaccaagcaccccgggtttgctaccccatgctgcgaaagaaggacgatcctaatgggaatagcggttacgaagaactcaaagacggggaattcaagaaagaagatcggcagaagaagctgaccacgccgtggacaccgtgggcaatggcggagtatctggcctccatcttcggcaccgagaaagacaaagtcaactgttcattttatttcaaaattggagcatgtcgtcatggagacaggtgctctcggttgcacaataaaccgacgtttagccagaccattgccctcttgaacatttaccgtaaccctcaaaactcttcccagtctgctgacggtttgcgctgtgccgtgagcgatgtggagatgcaggaacactatgatgagttttttgaggaggtttttacagaaatggaggagaagtatggggaagtagaggagatgaacgtctgtgacaacctgggagaccacctggtggggaacgtgtacgtcaagtttcgccgtgaggaagatgcggaaaaggctgtgattgacttgaataaccgttggtttaatggacagccgatccacgccgagctgtcacccgtgacggacttcagagaagcctgctgccgtcagtatgagatgggagaatgcacacgaggcggcttctgcaacttcatgcatttgaagcccatttccagagagctgcggcgggagctgtatggccgccgtcgcaagaagcatagatcaagatcccgatcccgggagcgtcgttctcggtctagagaccgtggtcgtggcggtggcggtggcggtggtggaggtggcggcggacgggagcgtgacaggaggcggtcgagagatcgtgaaagatctgggcgattcaaacggacagccgacggaagcgagttcgagtcaccaaagaagaagcggaaagtc

SEQ ID NO: 577 - DNA, 5676 bp, synthetic construct
  source 1..5676: mol_type = other DNA
atgaaacggacagccgacggaagcgagttcgagtcaccaaagaagaagcggaaagtcacgactactatgaagatttcaattgaattcctcgagccgtttcggatgaccaaatggcaggaaagcactaggcgaaacaagaacaacaaggaatttgttcgcggccaagcttttgcaagatggcatagaaataagaaggataacacaaaagggcggccttacataactgggacattgctgcggtccgcagtaattagaagcgcggaaaacctgctgacattgagtgatgggaaaattagcgaaaagacatgttgtcctgggaaatttgatacggaagataaagacaggttgctgcaattgaggcagcggtccacccttcgttggaccgataagaacccctgtccagataacgctgaaacttactgcccgttttgcgaacttctcgggagatccggtaacgatggaaagaaggctgagaagaaggattggcgctttcgtattcattttggcaatctttcccttccagggaagcccgatttcgacgggccaaaagctataggcagccaacgggtacttaacagggtcgatttcaaatccggtaaggcccatgacttctttaaggcttacgaagtcgaccatactaggtttccccgcttcgaaggggagattaccatagataataaagtcagcgctgaagccaggaaactgctctgtgattctctcaagtttacggatcggctgtgtggagctctgtgcgtaatcaggttcgatgaatatacaccagcagccgatagtgggaaacaaaccgaaaatgtccaagcagaaccgaatgctaatctcgctgaaaagaccgcagagcaaattattagcattctggacgataataagaaaaccgaatatacccgcctgcttgctgatgctattcgttcactccgccgctctagtaaacttgtcgctggcttgccaaaggatcatgacgggaaggatgaccattacctctgggatatcggcaagaagaagaaagacgaaaactctgtcactattaggcaaatccttacgacctcagcagacaccaaggaactcaagaatgccggaaaatggagagaattctgcgagaagctgggtgaagcgctgtacctcaagagtaaagacatgagtggcggcctgaaaattactcggagaatactgggcgatgctgaattccatggaaagcccgatcggcttgaaaagagccggtctgtgtcaatcggatctgtgttgaaagaaactgtggtatgcggcgaactggtcgctaaaacgcccttcttcttcggagcgatagacgaagatgcaaaacaaaccgacctgcaagtactcctcactcccgataacaagtatagactgccaagaagcgccgtgcgaggtatactccgtcgagatcttcaaacctattttgatagcccatgcaatgctgagttgggtggacggccatgcatgtgtaagacgtgtaggattatgagagggatcacggtgatggatgcgcgcagtgagtacaatgccccgccagaaataaggcatcgtacccgcattaatcccttcacaggcacggttgcggaaggtgccctgtttaatatggaagtagcccccgaggggattgtctttccatttcaactccggtaccggggctctgaagatgggctgcccgatgcactgaaaacggtgttgaaatggtgggctgaggggcaggcattcatgagtggcgctgcctcaaccgggaagggccgattccggatggaaaatgctaaatatgaaacgctggatctgagcgacgagaatcaaaggaatgactatcttaagaattggggatggcgtgacgagaaggggctcgaggaactgaagaaacgactgaactcaggtctgccagagcccggtaattatagggatccaaaatggcacgagattaacgtttccattgagatggcaagcccttttattaatggcgacccaatccgcgcagccgtggacaaacgtggtacagatgtggttaccttcgttaagtataaagctgaaggggaagaggcgaaacccgtatgtgcatacaaggccgaatcttttagaggggtgatcagaagtgccgtggcacgcattcatatggaagatggcgtccctttgactgagttgactcacagtgactgtgaatgtctcctgtgccaaatctttggaagtgagtatgaagccggcaaaataaggtttgaagatctcgtattcgaaagtgacccggaacctgtgaccttcgatcatgtggccatcgatagattcactggcggtgcagctgataagaagaaattcgatgattcccctctgcccggtagccctgcaagaccgctcatgttgaaaggctccttctggatccgcagggacgttctcgaggacgaagagtactgtaaggcactcggtaaggctcttgcagatgtgaataatggcctttatcccctcggtggaaagagcgccatcggctacggacaggtcaagagtctgggtataaagggagatgataagaggatttctcgcctcatgaatcctgcctttgatgagacagatgtagccgttccagaaaagcccaaaactgatgccgaggttcgcatcgaggcagagaaagtatattacccacactatttcgtcgaaccccataagaaggtggaacgcgaggagaaaccctgtggtcatcaaaagttccacgaggggcgactgacaggtaaaattcggtgtaagctcattaccaagacacccctcatcgtcccagatactagtaatgacgatttcttcagacctgcggataaagaagctcggaaggaaaaggacgaatatcataaatcatatgctttcttcagacttcataaacaaatcatgattcccgggagcgaattgagaggaatggtgagtagtgtctacgaaactgtgacaaattcttgcttcaggatatttgatgagactaaacggttgtcatggcggatggatgctgatcaccagaatgtgctgcaagactttctcccaggtcgagtgaccgccgatgggaaacatatacaaaagttttccgaaactgcaagggtgcctttctatgacaaaacgcagaaacattttgacattcttgatgagcaagaaattgctggtgagaaacctgttcggatgtgggtcaagcgttttattaaacgactgagcctcgttgatcctgctaaacacccccagaagaaacaagacaataaatggaaaagacgcaaagaaggcatcgccacatttatagagcaaaagaatggctcttattattttaacgtggtcaccaataatggctgcacttctttccacttgtggcataaacctgacaattttgaccaggagaaactcgaaggcatacagaatggtgagaaactggattgctgggtaagagatagtagataccaaaaggcctttcaagagatacccgagaacgacccagacggatgggagtgtaaagagggctaccttcatgtcgtcggccccagcaaagtagagtttagtgacaagaaaggggatgtgatcaataactttcaaggaacactcccatcagttcccaacgactggaaaacaattaggacgaacgattttaagaataggaaaaggaagaatgaacctgtgttttgttgtgaggatgataagggcaattactataccatggctaaatattgcgaaaccttcttcttcgatctgaaggagaacgaggaatacgagatccccgagaaagcaagaatcaaatacaaagaactgctcagggtctataacaacaatcctcaagcagtgccggagagcgtatttcagtctagagttgcccgggaaaacgtggaaaagctgaagtccggagatcttgtgtatttcaaacataatgaaaagtacgtagaggacatcgtcccagtgcggatttcccgaactgtagacgataggatgatcggcaaacgtatgagcgccgatctgcggccgtgccatggagattgggtggaagatggtgatctcagtgccttgaatgcatatcccgagaaaagactcctcttgcgccaccccaaaggactctgccctgcttgccggctctttggaaccggatcttacaagggcagagtcaggtttggattcgcgtcactcgaaaacgatccggagtggctgatcccaggcaagaatcccggcgatccgtttcacggcgggccggtgatgctctcattgttggaacggcctcgcccgacttggagtataccgggatccgacaataagtttaaagtgcctggcagaaagttttacgtccaccaccacgcctggaaaaccattaaggacgggaaccatcccacaacaggcaaagctattgaacaaagccctaataaccgcactgtagaagctctcgccggcgggaattcctttagcttcgaaattgcctttgagaacctgaaagaatgggagctgggtttgctcatccacagcctgcaactcgaaaagggtctggcgcataaacttggaatggcaaagtctatgggatttggttcagttgaaattgacgtcgaatcagtgcgcctgagaaaagattggaagcaatggcggaatggcaattccgaaattcccaactggttgggaaaaggatttgctaaactgaaggaatggttccgggacgagctcgattttatagaaaatcttaagaaacttctttggtttcctgagggcgaccaagcaccccgggtttgctaccccatgctgcgaaagaaggacgatcctaatgggaatagcggttacgaagaactcaaagacggggaattcaagaaagaagatcggcagaagaagctgaccacgccgtggacaccgtgggcatctggcagcgagacaccaggaacaagcgagtcagcaacaccagagagcgcggagtatctggcctccatcttcggcaccgagaaagacaaagtcaactgttcattttatttcaaaattggagcatgtcgtcatggagacaggtgctctcggttgcacaataaaccgacgtttagccagaccattgccctcttgaacatttaccgtaaccctcaaaactcttcccagtctgctgacggtttgcgctgtgccgtgagcgatgtggagatgcaggaacactatgatgagttttttgaggaggtttttacagaaatggaggagaagtatggggaagtagaggagatgaacgtctgtgacaacctgggagaccacctggtggggaacgtgtacgtcaagtttcgccgtgaggaagatgcggaaaaggctgtgattgacttgaataaccgttggtttaatggacagccgatccacgccgagctgtcacccgtgacggacttcagagaagcctgctgccgtcagtatgagatgggagaatgcacacgaggcggcttctgcaacttcatgcatttgaagcccatttccagagagctgcggcgggagctgtatggccgccgtcgcaagaagcatagatcaagatcccgatcccgggagcgtcgttctcggtctagagaccgtggtcgtggcggtggcggtggcggtggtggaggtggcggcggacgggagcgtgacaggaggcggtcgagagatcgtgaaagatctgggcgattcaaacggacagccgacggaagcgagttcgagtcaccaaagaagaagcggaaagtc

SEQ ID NO: 578 - DNA, 6381 bp, synthetic construct
  source 1..6381: mol_type = other DNA
atgaaacggacagccgacggaagcgagttcgagtcaccaaagaagaagcggaaagtcacgactactatgaagatttcaattgaattcctcgagccgtttcggatgaccaaatggcaggaaagcactaggcgaaacaagaacaacaaggaatttgttcgcggccaagcttttgcaagatggcatagaaataagaaggataacacaaaagggcggccttacataactgggacattgctgcggtccgcagtaattagaagcgcggaaaacctgctgacattgagtgatgggaaaattagcgaaaagacatgttgtcctgggaaatttgatacggaagataaagacaggttgctgcaattgaggcagcggtccacccttcgttggaccgataagaacccctgtccagataacgctgaaacttactgcccgttttgcgaacttctcgggagatccggtaacgatggaaagaaggctgagaagaaggattggcgctttcgtattcattttggcaatctttcccttccagggaagcccgatttcgacgggccaaaagctataggcagccaacgggtacttaacagggtcgatttcaaatccggtaaggcccatgacttctttaaggcttacgaagtcgaccatactaggtttccccgcttcgaaggggagattaccatagataataaagtcagcgctgaagccaggaaactgctctgtgattctctcaagtttacggatcggctgtgtggagctctgtgcgtaatcaggttcgatgaatatacaccagcagccgatagtgggaaacaaaccgaaaatgtccaagcagaaccgaatgctaatctcgctgaaaagaccgcagagcaaattattagcattctggacgataataagaaaaccgaatatacccgcctgcttgctgatgctattcgttcactccgccgctctagtaaacttgtcgctggcttgccaaaggatcatgacgggaaggatgaccattacctctgggatatcggcaagaagaagaaagacgaaaactctgtcactattaggcaaatccttacgacctcagcagacaccaaggaactcaagaatgccggaaaatggagagaattctgcgagaagctgggtgaagcgctgtacctcaagagtaaagacatgagtggcggcctgaaaattactcggagaatactgggcgatgctgaattccatggaaagcccgatcggcttgaaaagagccggtctgtgtcaatcggatctgtgttgaaagaaactgtggtatgcggcgaactggtcgctaaaacgcccttcttcttcggagcgatagacgaagatgcaaaacaaaccgacctgcaagtactcctcactcccgataacaagtatagactgccaagaagcgccgtgcgaggtatactccgtcgagatcttcaaacctattttgatagcccatgcaatgctgagttgggtggacggccatgcatgtgtaagacgtgtaggattatgagagggatcacggtgatggatgcgcgcagtgagtacaatgccccgccagaaataaggcatcgtacccgcattaatcccttcacaggcacggttgcggaaggtgccctgtttaatatggaagtagcccccgaggggattgtctttccatttcaactccggtaccggggctctgaagatgggctgcccgatgcactgaaaacggtgttgaaatggtgggctgaggggcaggcattcatgagtggcgctgcctcaaccgggaagggccgattccggatggaaaatgctaaatatgaaacgctggatctgagcgacgagaatcaaaggaatgactatcttaagaattggggatggcgtgacgagaaggggctcgaggaactgaagaaacgactgaactcaggtctgccagagcccggtaattatagggatccaaaatggcacgagattaacgtttccattgagatggcaagcccttttattaatggcgacccaatccgcgcagccgtggacaaacgtggtacagatgtggttaccttcgttaagtataaagctgaaggggaagaggcgaaacccgtatgtgcatacaaggccgaatcttttagaggggtgatcagaagtgccgtggcacgcattcatatggaagatggcgtccctttgactgagttgactcacagtgactgtgaatgtctcctgtgccaaatctttggaagtgagtatgaagccggcaaaataaggtttgaagatctcgtattcgaaagtgacccggaacctgtgaccttcgatcatgtggccatcgatagattcactggcggtgcagctgataagaagaaattcgatgattcccctctgcccggtagccctgcaagaccgctcatgttgaaaggctccttctggatccgcagggacgttctcgaggacgaagagtactgtaaggcactcggtaaggctcttgcagatgtgaataatggcctttatcccctcggtggaaagagcgccatcggctacggacaggtcaagagtctgggtataaagggagatgataagaggatttctcgcctcatgaatcctgcctttgatgagacagatgtagccgttccagaaaagcccaaaactgatgccgaggttcgcatcgaggcagagaaagtatattacccacactatttcgtcgaaccccataagaaggtggaacgcgaggagaaaccctgtggtcatcaaaagttccacgaggggcgactgacaggtaaaattcggtgtaagctcattaccaagacacccctcatcgtcccagatactagtaatgacgatttcttcagacctgcggataaagaagctcggaaggaaaaggacgaatatcataaatcatatgctttcttcagacttcataaacaaatcatgattcccgggagcgaattgagaggaatggtgagtagtgtctacgaaactgtgacaaattcttgcttcaggatatttgatgagactaaacggttgtcatggcggatggatgctgatcaccagaatgtgctgcaagactttctcccaggtcgagtgaccgccgatgggaaacatatacaaaagttttccgaaactgcaagggtgcctttctatgacaaaacgcagaaacattttgacattcttgatgagcaagaaattgctggtgagaaacctgttcggatgtgggtcaagcgttttattaaacgactgagcctcgttgatcctgctaaacacccccagaagaaacaagacaataaatggaaaagacgcaaagaaggcatcgccacatttatagagcaaaagaatggctcttattattttaacgtggtcaccaataatggctgcacttctttccacttgtggcataaacctgacaattttgaccaggagaaactcgaaggcatacagaatggtgagaaactggattgctgggtaagagatagtagataccaaaaggcctttcaagagatacccgagaacgacccagacggatgggagtgtaaagagggctaccttcatgtcgtcggccccagcaaagtagagtttagtgacaagaaaggggatgtgatcaataactttcaaggaacactcccatcagttcccaacgactggaaaacaattaggacgaacgattttaagaataggaaaaggaagaatgaacctgtgttttgttgtgaggatgataagggcaattactataccatggctaaatattgcgaaaccttcttcttcgatctgaaggagaacgaggaatacgagatccccgagaaagcaagaatcaaatacaaagaactgctcagggtctataacaacaatcctcaagcagtgccggagagcgtatttcagtctagagttgcccgggaaaacgtggaaaagctgaagtccggagatcttgtgtatttcaaacataatgaaaagtacgtagaggacatcgtcccagtgcggatttcccgaactgtagacgataggatgatcggcaaacgtatgagcgccgatctgcggccgtgccatggagattgggtggaagatggtgatctcagtgccttgaatgcatatcccgagaaaagactcctcttgcgccaccccaaaggactctgccctgcttgccggctctttggaaccggatcttacaagggcagagtcaggtttggattcgcgtcactcgaaaacgatccggagtggctgatcccaggcaagaatcccggcgatccgtttcacggcgggccggtgatgctctcattgttggaacggcctcgcccgacttggagtataccgggatccgacaataagtttaaagtgcctggcagaaagttttacgtccaccaccacgcctggaaaaccattaaggacgggaaccatcccacaacaggcaaagctattgaacaaagccctaataaccgcactgtagaagctctcgccggcgggaattcctttagcttcgaaattgcctttgagaacctgaaagaatgggagctgggtttgctcatccacagcctgcaactcgaaaagggtctggcgcataaacttggaatggcaaagtctatgggatttggttcagttgaaattgacgtcgaatcagtgcgcctgagaaaagattggaagcaatggcggaatggcaattccgaaattcccaactggttgggaaaaggatttgctaaactgaaggaatggttccgggacgagctcgattttatagaaaatcttaagaaacttctttggtttcctgagggcgaccaagcaccccgggtttgctaccccatgctgcgaaagaaggacgatcctaatgggaatagcggttacgaagaactcaaagacggggaattcaagaaagaagatcggcagaagaagctgaccacgccgtggacaccgtgggcatctggcagcgagacaccaggaacaagcgagtcagcaacaccagagagctcggacttcgacgagttcgagcggcagctcaacgagaataaacaagagcgggacaaggagaaccggcatcggaagcgcagccacagccgctctcggagccgggaccgcaaacgccggagccggagccgcgaccggcgcaaccgggaccagcggagcgcctcccgggacaggcgacgacgcagcaaacctttgaccagaggcgctaaagaggagcacggtggactgattcgttccccccgccacgagaagaagaagaaggtccgtaaatactgggacgtgccacccccaggctttgagcacatcaccccaatgcagtacaaggccatgcaagctgcgggtcagattccagccactgctcttctccccaccatgacccctgacggtctggctgtgaccccaacgccggtgcccgtggtcgggagccagatgaccagacaagcccggcgcctctacgtgggcaacatcccctttggcatcactgaggaggccatgatggatttcttcaacgcccagatgcgcctgggggggctgacccaggcccctggcaacccagtgttggctgtgcagattaaccaggacaagaattttgcctttttggagttccgctcagtggacgagactacccaggctatggcctttgatggcatcatcttccagggccagtcactaaagatccgcaggcctcacgactaccagccgcttcctggcatgtcagagaacccctccgtctatgtgcctggggttgtgtccactgtggtccccgactctgcccacaagctgttcatcgggggcttacccaactacctgaacgatgaccaggtcaaagagctgctgacatcctttgggcccctcaaggccttcaacctggtcaaggacagtgccacggggctctccaagggctacgccttctgtgagtacgtggacatcaacgtcacggatcaggccattgcggggctgaacggcatgcagctgggggataagaagctgctggtccagagggcgagtgtgggagccaagaatgccacgctggtgagccccccgagcaccatcaatcagacgcctgtgaccctgcaagtgccgggcttgatgagctcccaggtgcagatgggcggccacccgactgaggtcctgtgcctcatgaacatggtgctgcctgaggagctgctggacgacgaggagtatgaggagatcgtggaggacgtgcgggacgagtgcagcaagtacgggcttgtcaagtccatcgagatcccccggcctgtggacggcgtcgaggtgcccggctgcggaaagatctttgtggagttcacctctgtgtttgactgccagaaagccatgcagggcctgacgggccgcaagttcgccaacagagtggttgtcacaaaatactgtgaccccgactcttatcaccgccgggacttctggaaacggacagccgacggaagcgagttcgagtcaccaaagaagaagcggaaagtc

SEQ ID NO: 579 - DNA, 6156 bp, synthetic construct
  source 1..6156: mol_type = other DNA
atgaaacggacagccgacggaagcgagttcgagtcaccaaagaagaagcggaaagtcacgactactatgaagatttcaattgaattcctcgagccgtttcggatgaccaaatggcaggaaagcactaggcgaaacaagaacaacaaggaatttgttcgcggccaagcttttgcaagatggcatagaaataagaaggataacacaaaagggcggccttacataactgggacattgctgcggtccgcagtaattagaagcgcggaaaacctgctgacattgagtgatgggaaaattagcgaaaagacatgttgtcctgggaaatttgatacggaagataaagacaggttgctgcaattgaggcagcggtccacccttcgttggaccgataagaacccctgtccagataacgctgaaacttactgcccgttttgcgaacttctcgggagatccggtaacgatggaaagaaggctgagaagaaggattggcgctttcgtattcattttggcaatctttcccttccagggaagcccgatttcgacgggccaaaagctataggcagccaacgggtacttaacagggtcgatttcaaatccggtaaggcccatgacttctttaaggcttacgaagtcgaccatactaggtttccccgcttcgaaggggagattaccatagataataaagtcagcgctgaagccaggaaactgctctgtgattctctcaagtttacggatcggctgtgtggagctctgtgcgtaatcaggttcgatgaatatacaccagcagccgatagtgggaaacaaaccgaaaatgtccaagcagaaccgaatgctaatctcgctgaaaagaccgcagagcaaattattagcattctggacgataataagaaaaccgaatatacccgcctgcttgctgatgctattcgttcactccgccgctctagtaaacttgtcgctggcttgccaaaggatcatgacgggaaggatgaccattacctctgggatatcggcaagaagaagaaagacgaaaactctgtcactattaggcaaatccttacgacctcagcagacaccaaggaactcaagaatgccggaaaatggagagaattctgcgagaagctgggtgaagcgctgtacctcaagagtaaagacatgagtggcggcctgaaaattactcggagaatactgggcgatgctgaattccatggaaagcccgatcggcttgaaaagagccggtctgtgtcaatcggatctgtgttgaaagaaactgtggtatgcggcgaactggtcgctaaaacgcccttcttcttcggagcgatagacgaagatgcaaaacaaaccgacctgcaagtactcctcactcccgataacaagtatagactgccaagaagcgccgtgcgaggtatactccgtcgagatcttcaaacctattttgatagcccatgcaatgctgagttgggtggacggccatgcatgtgtaagacgtgtaggattatgagagggatcacggtgatggatgcgcgcagtgagtacaatgccccgccagaaataaggcatcgtacccgcattaatcccttcacaggcacggttgcggaaggtgccctgtttaatatggaagtagcccccgaggggattgtctttccatttcaactccggtaccggggctctgaagatgggctgcccgatgcactgaaaacggtgttgaaatggtgggctgaggggcaggcattcatgagtggcgctgcctcaaccgggaagggccgattccggatggaaaatgctaaatatgaaacgctggatctgagcgacgagaatcaaaggaatgactatcttaagaattggggatggcgtgacgagaaggggctcgaggaactgaagaaacgactgaactcaggtctgccagagcccggtaattatagggatccaaaatggcacgagattaacgtttccattgagatggcaagcccttttattaatggcgacccaatccgcgcagccgtggacaaacgtggtacagatgtggttaccttcgttaagtataaagctgaaggggaagaggcgaaacccgtatgtgcatacaaggccgaatcttttagaggggtgatcagaagtgccgtggcacgcattcatatggaagatggcgtccctttgactgagttgactcacagtgactgtgaatgtctcctgtgccaaatctttggaagtgagtatgaagccggcaaaataaggtttgaagatctcgtattcgaaagtgacccggaacctgtgaccttcgatcatgtggccatcgatagattcactggcggtgcagctgataagaagaaattcgatgattcccctctgcccggtagccctgcaagaccgctcatgttgaaaggctccttctggatccgcagggacgttctcgaggacgaagagtactgtaaggcactcggtaaggctcttgcagatgtgaataatggcctttatcccctcggtggaaagagcgccatcggctacggacaggtcaagagtctgggtataaagggagatgataagaggatttctcgcctcatgaatcctgcctttgatgagacagatgtagccgttccagaaaagcccaaaactgatgccgaggttcgcatcgaggcagagaaagtatattacccacactatttcgtcgaaccccataagaaggtggaacgcgaggagaaaccctgtggtcatcaaaagttccacgaggggcgactgacaggtaaaattcggtgtaagctcattaccaagacacccctcatcgtcccagatactagtaatgacgatttcttcagacctgcggataaagaagctcggaaggaaaaggacgaatatcataaatcatatgctttcttcagacttcataaacaaatcatgattcccgggagcgaattgagaggaatggtgagtagtgtctacgaaactgtgacaaattcttgcttcaggatatttgatgagactaaacggttgtcatggcggatggatgctgatcaccagaatgtgctgcaagactttctcccaggtcgagtgaccgccgatgggaaacatatacaaaagttttccgaaactgcaagggtgcctttctatgacaaaacgcagaaacattttgacattcttgatgagcaagaaattgctggtgagaaacctgttcggatgtgggtcaagcgttttattaaacgactgagcctcgttgatcctgctaaacacccccagaagaaacaagacaataaatggaaaagacgcaaagaaggcatcgccacatttatagagcaaaagaatggctcttattattttaacgtggtcaccaataatggctgcacttctttccacttgtggcataaacctgacaattttgaccaggagaaactcgaaggcatacagaatggtgagaaactggattgctgggtaagagatagtagataccaaaaggcctttcaagagatacccgagaacgacccagacggatgggagtgtaaagagggctaccttcatgtcgtcggccccagcaaagtagagtttagtgacaagaaaggggatgtgatcaataactttcaaggaacactcccatcagttcccaacgactggaaaacaattaggacgaacgattttaagaataggaaaaggaagaatgaacctgtgttttgttgtgaggatgataagggcaattactataccatggctaaatattgcgaaaccttcttcttcgatctgaaggagaacgaggaatacgagatccccgagaaagcaagaatcaaatacaaagaactgctcagggtctataacaacaatcctcaagcagtgccggagagcgtatttcagtctagagttgcccgggaaaacgtggaaaagctgaagtccggagatcttgtgtatttcaaacataatgaaaagtacgtagaggacatcgtcccagtgcggatttcccgaactgtagacgataggatgatcggcaaacgtatgagcgccgatctgcggccgtgccatggagattgggtggaagatggtgatctcagtgccttgaatgcatatcccgagaaaagactcctcttgcgccaccccaaaggactctgccctgcttgccggctctttggaaccggatcttacaagggcagagtcaggtttggattcgcgtcactcgaaaacgatccggagtggctgatcccaggcaagaatcccggcgatccgtttcacggcgggccggtgatgctctcattgttggaacggcctcgcccgacttggagtataccgggatccgacaataagtttaaagtgcctggcagaaagttttacgtccaccaccacgcctggaaaaccattaaggacgggaaccatcccacaacaggcaaagctattgaacaaagccctaataaccgcactgtagaagctctcgccggcgggaattcctttagcttcgaaattgcctttgagaacctgaaagaatgggagctgggtttgctcatccacagcctgcaactcgaaaagggtctggcgcataaacttggaatggcaaagtctatgggatttggttcagttgaaattgacgtcgaatcagtgcgcctgagaaaagattggaagcaatggcggaatggcaattccgaaattcccaactggttgggaaaaggatttgctaaactgaaggaatggttccgggacgagctcgattttatagaaaatcttaagaaacttctttggtttcctgagggcgaccaagcaccccgggtttgctaccccatgctgcgaaagaaggacgatcctaatgggaatagcggttacgaagaactcaaagacggggaattcaagaaagaagatcggcagaagaagctgaccacgccgtggacaccgtgggcaggatccggtgggtccggtagtggtggttccgggtccggtggaagttccctgtacgatgacctaggagtggagaccagtgactcaaaaacagaaggctggtccaaaaacttcaaacttctgcagtctcagcttcaggtgaagaaggcagctctcactcaggcaaagagccaaaggacgaaacaaagtacagtcctcgccccagtcattgacctgaagcgaggtggctcctcagatgaccggcaaattgtggacactccaccgcatgtagcagctgggctgaaggatcctgttcccagtgggttttctgcaggggaagttctgattcccttagctgacgaatatgaccctatgtttcctaatgattatgagaaagtagtgaagcgccaaagagaggaacgacagagacagcgggagctggaaagacaaaaggaaatagaagaaagggaaaaaaggcgtaaagacagacatgaagcaagtgggtttgcaaggagaccagatccagattctgatgaagatgaagattatgagcgagagaggaggaaaagaagtatgggcggagctgccattgccccacccacttctctggtagagaaagacaaagagttaccccgagattttccttatgaagaggactcaagacctcgatcacagtcttccaaagcagccattcctcccccagtgtacgaggaacaagacagaccgagatctccaaccggacctagcaactccttcctcgctaacatggggggcacggtggcgcacaagatcatgcagaagtacggcttccgggagggccagggtctggggaagcatgagcagggcctgagcactgccttgtcagtggagaagaccagcaagcgtggcggcaagatcatcgtgggcgacgccacagagaaagatgcatccaagaagtcagattcaaatccgctgactgaaatacttaagtgtcctactaaagtggtcttactaaggaacatggttggtgcgggagaggtggatgaagacttggaagttgaaaccaaggaagaatgtgaaaaatatggcaaagttggaaaatgtgtgatatttgaaattcctggtgcccctgatgatgaagcagtacggatatttttagaatttgagagagttgaatcagcaattaaagcggttgttgacttgaatgggaggtattttggtggacgggtggtaaaagcatgtttctacaatttggacaaattcagggtcttggatttggcagaacaagttaaacggacagccgacggaagcgagttcgagtcaccaaagaagaagcggaaagtc

SEQ ID NO: 580 - DNA, 5328 bp, synthetic construct
  source 1..5328: mol_type = other DNA
atgaaacggacagccgacggaagcgagttcgagtcaccaaagaagaagcggaaagtcacgactactatgaagatttcaattgaattcctcgagccgtttcggatgaccaaatggcaggaaagcactaggcgaaacaagaacaacaaggaatttgttcgcggccaagcttttgcaagatggcatagaaataagaaggataacacaaaagggcggccttacataactgggacattgctgcggtccgcagtaattagaagcgcggaaaacctgctgacattgagtgatgggaaaattagcgaaaagacatgttgtcctgggaaatttgatacggaagataaagacaggttgctgcaattgaggcagcggtccacccttcgttggaccgataagaacccctgtccagataacgctgaaacttactgcccgttttgcgaacttctcgggagatccggtaacgatggaaagaaggctgagaagaaggattggcgctttcgtattcattttggcaatctttcccttccagggaagcccgatttcgacgggccaaaagctataggcagccaacgggtacttaacagggtcgatttcaaatccggtaaggcccatgacttctttaaggcttacgaagtcgaccatactaggtttccccgcttcgaaggggagattaccatagataataaagtcagcgctgaagccaggaaactgctctgtgattctctcaagtttacggatcggctgtgtggagctctgtgcgtaatcaggttcgatgaatatacaccagcagccgatagtgggaaacaaaccgaaaatgtccaagcagaaccgaatgctaatctcgctgaaaagaccgcagagcaaattattagcattctggacgataataagaaaaccgaatatacccgcctgcttgctgatgctattcgttcactccgccgctctagtaaacttgtcgctggcttgccaaaggatcatgacgggaaggatgaccattacctctgggatatcggcaagaagaagaaagacgaaaactctgtcactattaggcaaatccttacgacctcagcagacaccaaggaactcaagaatgccggaaaatggagagaattctgcgagaagctgggtgaagcgctgtacctcaagagtaaagacatgagtggcggcctgaaaattactcggagaatactgggcgatgctgaattccatggaaagcccgatcggcttgaaaagagccggtctgtgtcaatcggatctgtgttgaaagaaactgtggtatgcggcgaactggtcgctaaaacgcccttcttcttcggagcgatagacgaagatgcaaaacaaaccgacctgcaagtactcctcactcccgataacaagtatagactgccaagaagcgccgtgcgaggtatactccgtcgagatcttcaaacctattttgatagcccatgcaatgctgagttgggtggacggccatgcatgtgtaagacgtgtaggattatgagagggatcacggtgatggatgcgcgcagtgagtacaatgccccgccagaaataaggcatcgtacccgcattaatcccttcacaggcacggttgcggaaggtgccctgtttaatatggaagtagcccccgaggggattgtctttccatttcaactccggtaccggggctctgaagatgggctgcccgatgcactgaaaacggtgttgaaatggtgggctgaggggcaggcattcatgagtggcgctgcctcaaccgggaagggccgattccggatggaaaatgctaaatatgaaacgctggatctgagcgacgagaatcaaaggaatgactatcttaagaattggggatggcgtgacgagaaggggctcgaggaactgaagaaacgactgaactcaggtctgccagagcccggtaattatagggatccaaaatggcacgagattaacgtttccattgagatggcaagcccttttattaatggcgacccaatccgcgcagccgtggacaaacgtggtacagatgtggttaccttcgttaagtataaagctgaaggggaagaggcgaaacccgtatgtgcatacaaggccgaatcttttagaggggtgatcagaagtgccgtggcacgcattcatatggaagatggcgtccctttgactgagttgactcacagtgactgtgaatgtctcctgtgccaaatctttggaagtgagtatgaagccggcaaaataaggtttgaagatctcgtattcgaaagtgacccggaacctgtgaccttcgatcatgtggccatcgatagattcactggcggtgcagctgataagaagaaattcgatgattcccctctgcccggtagccctgcaagaccgctcatgttgaaaggctccttctggatccgcagggacgttctcgaggacgaagagtactgtaaggcactcggtaaggctcttgcagatgtgaataatggcctttatcccctcggtggaaagagcgccatcggctacggacaggtcaagagtctgggtataaagggagatgataagaggatttctcgcctcatgaatcctgcctttgatgagacagatgtagccgttccagaaaagcccaaaactgatgccgaggttcgcatcgaggcagagaaagtatattacccacactatttcgtcgaaccccataagaaggtggaacgcgaggagaaaccctgtggtcatcaaaagttccacgaggggcgactgacaggtaaaattcggtgtaagctcattaccaagacacccctcatcgtcccagatactagtaatgacgatttcttcagacctgcggataaagaagctcggaaggaaaaggacgaatatcataaatcatatgctttcttcagacttcataaacaaatcatgattcccgggagcgaattgagaggaatggtgagtagtgtctacgaaactgtgacaaattcttgcttcaggatatttgatgagactaaacggttgtcatggcggatggatgctgatcaccagaatgtgctgcaagactttctcccaggtcgagtgaccgccgatgggaaacatatacaaaagttttccgaaactgcaagggtgcctttctatgacaaaacgcagaaacattttgacattcttgatgagcaagaaattgctggtgagaaacctgttcggatgtgggtcaagcgttttattaaacgactgagcctcgttgatcctgctaaacacccccagaagaaacaagacaataaatggaaaagacgcaaagaaggcatcgccacatttatagagcaaaagaatggctcttattattttaacgtggtcaccaataatggctgcacttctttccacttgtggcataaacctgacaattttgaccaggagaaactcgaaggcatacagaatggtgagaaactggattgctgggtaagagatagtagataccaaaaggcctttcaagagatacccgagaacgacccagacggatgggagtgtaaagagggctaccttcatgtcgtcggccccagcaaagtagagtttagtgacaagaaaggggatgtgatcaataactttcaaggaacactcccatcagttcccaacgactggaaaacaattaggacgaacgattttaagaataggaaaaggaagaatgaacctgtgttttgttgtgaggatgataagggcaattactataccatggctaaatattgcgaaaccttcttcttcgatctgaaggagaacgaggaatacgagatccccgagaaagcaagaatcaaatacaaagaactgctcagggtctataacaacaatcctcaagcagtgccggagagcgtatttcagtctagagttgcccgggaaaacgtggaaaagctgaagtccggagatcttgtgtatttcaaacataatgaaaagtacgtagaggacatcgtcccagtgcggatttcccgaactgtagacgataggatgatcggcaaacgtatgagcgccgatctgcggccgtgccatggagattgggtggaagatggtgatctcagtgccttgaatgcatatcccgagaaaagactcctcttgcgccaccccaaaggactctgccctgcttgccggctctttggaaccggatcttacaagggcagagtcaggtttggattcgcgtcactcgaaaacgatccggagtggctgatcccaggcaagaatcccggcgatccgtttcacggcgggccggtgatgctctcattgttggaacggcctcgcccgacttggagtataccgggatccgacaataagtttaaagtgcctggcagaaagttttacgtccaccaccacgcctggaaaaccattaaggacgggaaccatcccacaacaggcaaagctattgaacaaagccctaataaccgcactgtagaagctctcgccggcgggaattcctttagcttcgaaattgcctttgagaacctgaaagaatgggagctgggtttgctcatccacagcctgcaactcgaaaagggtctggcgcataaacttggaatggcaaagtctatgggatttggttcagttgaaattgacgtcgaatcagtgcgcctgagaaaagattggaagcaatggcggaatggcaattccgaaattcccaactggttgggaaaaggatttgctaaactgaaggaatggttccgggacgagctcgattttatagaaaatcttaagaaacttctttggtttcctgagggcgaccaagcaccccgggtttgctaccccatgctgcgaaagaaggacgatcctaatgggaatagcggttacgaagaactcaaagacggggaattcaagaaagaagatcggcagaagaagctgaccacgccgtggacaccgtgggcaggatccggtgggtccggtagtggtggttccgggtccggtggaagtgcgatgcaagcggccaagagggcgaacattcgacttccacctgaagtaaatcggatattgtatataagaaatttgccatacaaaatcacagctgaagaaatgtatgatatatttgggaaatatggacctattcgtcaaatcagagtggggaacacacctgaaactagaggaacagcttatgtggtctatgaggacatctttgatgccaagaatgcatgtgatcacctatcgggattcaatgtttgtaacagataccttgtggttttgtactataatgccaacagggcatttcagaagatggacacaaagaagaaggaggaacagttgaagcttctcaaggagaaatatggcatcaacacagatccaccaaaaaaacggacagccgacggaagcgagttcgagtcaccaaagaagaagcggaaagtc

SEQ ID NO: 581 - DNA, 720 bp, synthetic construct
  source 1..720: mol_type = other DNA
atggcggagtatctggcctccatcttcggcaccgagaaagacaaagtcaactgttcattttatttcaaaattggagcatgtcgtcatggagacaggtgctctcggttgcacaataaaccgacgtttagccagaccattgccctcttgaacatttaccgtaaccctcaaaactcttcccagtctgctgacggtttgcgctgtgccgtgagcgatgtggagatgcaggaacactatgatgagttttttgaggaggtttttacagaaatggaggagaagtatggggaagtagaggagatgaacgtctgtgacaacctgggagaccacctggtggggaacgtgtacgtcaagtttcgccgtgaggaagatgcggaaaaggctgtgattgacttgaataaccgttggtttaatggacagccgatccacgccgagctgtcacccgtgacggacttcagagaagcctgctgccgtcagtatgagatgggagaatgcacacgaggcggcttctgcaacttcatgcatttgaagcccatttccagagagctgcggcgggagctgtatggccgccgtcgcaagaagcatagatcaagatcccgatcccgggagcgtcgttctcggtctagagaccgtggtcgtggcggtggcggtggcggtggtggaggtggcggcggacgggagcgtgacaggaggcggtcgagagatcgtgaaagatctgggcgattc

SEQ ID NO: 582 - DNA, 5673 bp, synthetic construct
  source 1..5673: mol_type = other DNA
atgaaacggacagccgacggaagcgagttcgagtcaccaaagaagaagcggaaagtcacgactactatgaagatttcaattgaattcctcgagccgtttcggatgaccaaatggcaggaaagcactaggcgaaacaagaacaacaaggaatttgttcgcggccaagcttttgcaagatggcatagaaataagaaggataacacaaaagggcggccttacataactgggacattgctgcggtccgcagtaattagaagcgcggaaaacctgctgacattgagtgatgggaaaattagcgaaaagacatgttgtcctgggaaatttgatacggaagataaagacaggttgctgcaattgaggcagcggtccacccttcgttggaccgataagaacccctgtccagataacgctgaaacttactgcccgttttgcgaacttctcgggagatccggtaacgatggaaagaaggctgagaagaaggattggcgctttcgtattcattttggcaatctttcccttccagggaagcccgatttcgacgggccaaaagctataggcagccaacgggtacttaacagggtcgatttcaaatccggtaaggcccatgacttctttaaggcttacgaagtcgaccatactaggtttccccgcttcgaaggggagattaccatagataataaagtcagcgctgaagccaggaaactgctctgtgattctctcaagtttacggatcggctgtgtggagctctgtgcgtaatcaggttcgatgaatatacaccagcagccgatagtgggaaacaaaccgaaaatgtccaagcagaaccgaatgctaatctcgctgaaaagaccgcagagcaaattattagcattctggacgataataagaaaaccgaatatacccgcctgcttgctgatgctattcgttcactccgccgctctagtaaacttgtcgctggcttgccaaaggatcatgacgggaaggatgaccattacctctgggatatcggcaagaagaagaaagacgaaaactctgtcactattaggcaaatccttacgacctcagcagacaccaaggaactcaagaatgccggaaaatggagagaattctgcgagaagctgggtgaagcgctgtacctcaagagtaaagacatgagtggcggcctgaaaattactcggagaatactgggcgatgctgaattccatggaaagcccgatcggcttgaaaagagccggtctgtgtcaatcggatctgtgttgaaagaaactgtggtatgcggcgaactggtcgctaaaacgcccttcttcttcggagcgatagacgaagatgcaaaacaaaccgacctgcaagtactcctcactcccgataacaagtatagactgccaagaagcgccgtgcgaggtatactccgtcgagatcttcaaacctattttgatagcccatgcaatgctgagttgggtggacggccatgcatgtgtaagacgtgtaggattatgagagggatcacggtgatggatgcgcgcagtgagtacaatgccccgccagaaataaggcatcgtacccgcattaatcccttcacaggcacggttgcggaaggtgccctgtttaatatggaagtagcccccgaggggattgtctttccatttcaactccggtaccggggctctgaagatgggctgcccgatgcactgaaaacggtgttgaaatggtgggctgaggggcaggcattcatgagtggcgctgcctcaaccgggaagggccgattccggatggaaaatgctaaatatgaaacgctggatctgagcgacgagaatcaaaggaatgactatcttaagaattggggatggcgtgacgagaaggggctcgaggaactgaagaaacgactgaactcaggtctgccagagcccggtaattatagggatccaaaatggcacgagattaacgtttccattgagatggcaagcccttttattaatggcgacccaatccgcgcagccgtggacaaacgtggtacagatgtggttaccttcgttaagtataaagctgaaggggaagaggcgaaacccgtatgtgcatacaaggccgaatcttttagaggggtgatcagaagtgccgtggcacgcattcatatggaagatggcgtccctttgactgagttgactcacagtgactgtgaatgtctcctgtgccaaatctttggaagtgagtatgaagccggcaaaataaggtttgaagatctcgtattcgaaagtgacccggaacctgtgaccttcgatcatgtggccatcgatagattcactggcggtgcagctgataagaagaaattcgatgattcccctctgcccggtagccctgcaagaccgctcatgttgaaaggctccttctggatccgcagggacgttctcgaggacgaagagtactgtaaggcactcggtaaggctcttgcagatgtgaataatggcctttatcccctcggtggaaagagcgccatcggctacggacaggtcaagagtctgggtataaagggagatgataagaggatttctcgcctcatgaatcctgcctttgatgagacagatgtagccgttccagaaaagcccaaaactgatgccgaggttcgcatcgaggcagagaaagtatattacccacactatttcgtcgaaccccataagaaggtggaacgcgaggagaaaccctgtggtcatcaaaagttccacgaggggcgactgacaggtaaaattcggtgtaagctcattaccaagacacccctcatcgtcccagatactagtaatgacgatttcttcagacctgcggataaagaagctcggaaggaaaaggacgaatatcataaatcatatgctttcttcagacttcataaacaaatcatgattcccgggagcgaattgagaggaatggtgagtagtgtctacgaaactgtgacaaattcttgcttcaggatatttgatgagactaaacggttgtcatggcggatggatgctgatcaccagaatgtgctgcaagactttctcccaggtcgagtgaccgccgatgggaaacatatacaaaagttttccgaaactgcaagggtgcctttctatgacaaaacgcagaaacattttgacattcttgatgagcaagaaattgctggtgagaaacctgttcggatgtgggtcaagcgttttattaaacgactgagcctcgttgatcctgctaaacacccccagaagaaacaagacaataaatggaaaagacgcaaagaaggcatcgccacatttatagagcaaaagaatggctcttattattttaacgtggtcaccaataatggctgcacttctttccacttgtggcataaacctgacaattttgaccaggagaaactcgaaggcatacagaatggtgagaaactggattgctgggtaagagatagtagataccaaaaggcctttcaagagatacccgagaacgacccagacggatgggagtgtaaagagggctaccttcatgtcgtcggccccagcaaagtagagtttagtgacaagaaaggggatgtgatcaataactttcaaggaacactcccatcagttcccaacgactggaaaacaattaggacgaacgattttaagaataggaaaaggaagaatgaacctgtgttttgttgtgaggatgataagggcaattactataccatggctaaatattgcgaaaccttcttcttcgatctgaaggagaacgaggaatacgagatccccgagaaagcaagaatcaaatacaaagaactgctcagggtctataacaacaatcctcaagcagtgccggagagcgtatttcagtctagagttgcccgggaaaacgtggaaaagctgaagtccggagatcttgtgtatttcaaacataatgaaaagtacgtagaggacatcgtcccagtgcggatttcccgaactgtagacgataggatgatcggcaaacgtatgagcgccgatctgcggccgtgccatggagattgggtggaagatggtgatctcagtgccttgaatgcatatcccgagaaaagactcctcttgcgccaccccaaaggactctgccctgcttgccggctctttggaaccggatcttacaagggcagagtcaggtttggattcgcgtcactcgaaaacgatccggagtggctgatcccaggcaagaatcccggcgatccgtttcacggcgggccggtgatgctctcattgttggaacggcctcgcccgacttggagtataccgggatccgacaataagtttaaagtgcctggcagaaagttttacgtccaccaccacgcctggaaaaccattaaggacgggaaccatcccacaacaggcaaagctattgaacaaagccctaataaccgcactgtagaagctctcgccggcgggaattcctttagcttcgaaattgcctttgagaacctgaaagaatgggagctgggtttgctcatccacagcctgcaactcgaaaagggtctggcgcataaacttggaatggcaaagtctatgggatttggttcagttgaaattgacgtcgaatcagtgcgcctgagaaaagattggaagcaatggcggaatggcaattccgaaattcccaactggttgggaaaaggatttgctaaactgaaggaatggttccgggacgagctcgattttatagaaaatcttaagaaacttctttggtttcctgagggcgaccaagcaccccgggtttgctaccccatgctgcgaaagaaggacgatcctaatgggaatagcggttacgaagaactcaaagacggggaattcaagaaagaagatcggcagaagaagctgaccacgccgtggacaccgtgggcaggatccggtgggtccggtagtggtggttccgggtccggtggaagtgcggagtatctggcctccatcttcggcaccgagaaagacaaagtcaactgttcattttatttcaaaattggagcatgtcgtcatggagacaggtgctctcggttgcacaataaaccgacgtttagccagaccattgccctcttgaacatttaccgtaaccctcaaaactcttcccagtctgctgacggtttgcgctgtgccgtgagcgatgtggagatgcaggaacactatgatgagttttttgaggaggtttttacagaaatggaggagaagtatggggaagtagaggagatgaacgtctgtgacaacctgggagaccacctggtggggaacgtgtacgtcaagtttcgccgtgaggaagatgcggaaaaggctgtgattgacttgaataaccgttggtttaatggacagccgatccacgccgagctgtcacccgtgacggacttcagagaagcctgctgccgtcagtatgagatgggagaatgcacacgaggcggcttctgcaacttcatgcatttgaagcccatttccagagagctgcggcgggagctgtatggccgccgtcgcaagaagcatagatcaagatcccgatcccgggagcgtcgttctcggtctagagaccgtggtcgtggcggtggcggtggcggtggtggaggtggcggcggacgggagcgtgacaggaggcggtcgagagatcgtgaaagatctgggcgattcaaacggacagccgacggaagcgagttcgagtcaccaaagaagaagcggaaagtc

SEQ ID NO: 583 - DNA, 6378 bp, synthetic construct
  source 1..6378: mol_type = other DNA
atgaaacggacagccgacggaagcgagttcgagtcaccaaagaagaagcggaaagtcacgactactatgaagatttcaattgaattcctcgagccgtttcggatgaccaaatggcaggaaagcactaggcgaaacaagaacaacaaggaatttgttcgcggccaagcttttgcaagatggcatagaaataagaaggataacacaaaagggcggccttacataactgggacattgctgcggtccgcagtaattagaagcgcggaaaacctgctgacattgagtgatgggaaaattagcgaaaagacatgttgtcctgggaaatttgatacggaagataaagacaggttgctgcaattgaggcagcggtccacccttcgttggaccgataagaacccctgtccagataacgctgaaacttactgcccgttttgcgaacttctcgggagatccggtaacgatggaaagaaggctgagaagaaggattggcgctttcgtattcattttggcaatctttcccttccagggaagcccgatttcgacgggccaaaagctataggcagccaacgggtacttaacagggtcgatttcaaatccggtaaggcccatgacttctttaaggcttacgaagtcgaccatactaggtttccccgcttcgaaggggagattaccatagataataaagtcagcgctgaagccaggaaactgctctgtgattctctcaagtttacggatcggctgtgtggagctctgtgcgtaatcaggttcgatgaatatacaccagcagccgatagtgggaaacaaaccgaaaatgtccaagcagaaccgaatgctaatctcgctgaaaagaccgcagagcaaattattagcattctggacgataataagaaaaccgaatatacccgcctgcttgctgatgctattcgttcactccgccgctctagtaaacttgtcgctggcttgccaaaggatcatgacgggaaggatgaccattacctctgggatatcggcaagaagaagaaagacgaaaactctgtcactattaggcaaatccttacgacctcagcagacaccaaggaactcaagaatgccggaaaatggagagaattctgcgagaagctgggtgaagcgctgtacctcaagagtaaagacatgagtggcggcctgaaaattactcggagaatactgggcgatgctgaattccatggaaagcccgatcggcttgaaaagagccggtctgtgtcaatcggatctgtgttgaaagaaactgtggtatgcggcgaactggtcgctaaaacgcccttcttcttcggagcgatagacgaagatgcaaaacaaaccgacctgcaagtactcctcactcccgataacaagtatagactgccaagaagcgccgtgcgaggtatactccgtcgagatcttcaaacctattttgatagcccatgcaatgctgagttgggtggacggccatgcatgtgtaagacgtgtaggattatgagagggatcacggtgatggatgcgcgcagtgagtacaatgccccgccagaaataaggcatcgtacccgcattaatcccttcacaggcacggttgcggaaggtgccctgtttaatatggaagtagcccccgaggggattgtctttccatttcaactccggtaccggggctctgaagatgggctgcccgatgcactgaaaacggtgttgaaatggtgggctgaggggcaggcattcatgagtggcgctgcctcaaccgggaagggccgattccggatggaaaatgctaaatatgaaacgctggatctgagcgacgagaatcaaaggaatgactatcttaagaattggggatggcgtgacgagaaggggctcgaggaactgaagaaacgactgaactcaggtctgccagagcccggtaattatagggatccaaaatggcacgagattaacgtttccattgagatggcaagcccttttattaatggcgacccaatccgcgcagccgtggacaaacgtggtacagatgtggttaccttcgttaagtataaagctgaaggggaagaggcgaaacccgtatgtgcatacaaggccgaatcttttagaggggtgatcagaagtgccgtggcacgcattcatatggaagatggcgtccctttgactgagttgactcacagtgactgtgaatgtctcctgtgccaaatctttggaagtgagtatgaagccggcaaaataaggtttgaagatctcgtattcgaaagtgacccggaacctgtgaccttcgatcatgtggccatcgatagattcactggcggtgcagctgataagaagaaattcgatgattcccctctgcccggtagccctgcaagaccgctcatgttgaaaggctccttctggatccgcagggacgttctcgaggacgaagagtactgtaaggcactcggtaaggctcttgcagatgtgaataatggcctttatcccctcggtggaaagagcgccatcggctacggacaggtcaagagtctgggtataaagggagatgataagaggatttctcgcctcatgaatcctgcctttgatgagacagatgtagccgttccagaaaagcccaaaactgatgccgaggttcgcatcgaggcagagaaagtatattacccacactatttcgtcgaaccccataagaaggtggaacgcgaggagaaaccctgtggtcatcaaaagttccacgaggggcgactgacaggtaaaattcggtgtaagctcattaccaagacacccctcatcgtcccagatactagtaatgacgatttcttcagacctgcggataaagaagctcggaaggaaaaggacgaatatcataaatcatatgctttcttcagacttcataaacaaatcatgattcccgggagcgaattgagaggaatggtgagtagtgtctacgaaactgtgacaaattcttgcttcaggatatttgatgagactaaacggttgtcatggcggatggatgctgatcaccagaatgtgctgcaagactttctcccaggtcgagtgaccgccgatgggaaacatatacaaaagttttccgaaactgcaagggtgcctttctatgacaaaacgcagaaacattttgacattcttgatgagcaagaaattgctggtgagaaacctgttcggatgtgggtcaagcgttttattaaacgactgagcctcgttgatcctgctaaacacccccagaagaaacaagacaataaatggaaaagacgcaaagaaggcatcgccacatttatagagcaaaagaatggctcttattattttaacgtggtcaccaataatggctgcacttctttccacttgtggcataaacctgacaattttgaccaggagaaactcgaaggcatacagaatggtgagaaactggattgctgggtaagagatagtagataccaaaaggcctttcaagagatacccgagaacgacccagacggatgggagtgtaaagagggctaccttcatgtcgtcggccccagcaaagtagagtttagtgacaagaaaggggatgtgatcaataactttcaaggaacactcccatcagttcccaacgactggaaaacaattaggacgaacgattttaagaataggaaaaggaagaatgaacctgtgttttgttgtgaggatgataagggcaattactataccatggctaaatattgcgaaaccttcttcttcgatctgaaggagaacgaggaatacgagatccccgagaaagcaagaatcaaatacaaagaactgctcagggtctataacaacaatcctcaagcagtgccggagagcgtatttcagtctagagttgcccgggaaaacgtggaaaagctgaagtccggagatcttgtgtatttcaaacataatgaaaagtacgtagaggacatcgtcccagtgcggatttcccgaactgtagacgataggatgatcggcaaacgtatgagcgccgatctgcggccgtgccatggagattgggtggaagatggtgatctcagtgccttgaatgcatatcccgagaaaagactcctcttgcgccaccccaaaggactctgccctgcttgccggctctttggaaccggatcttacaagggcagagtcaggtttggattcgcgtcactcgaaaacgatccggagtggctgatcccaggcaagaatcccggcgatccgtttcacggcgggccggtgatgctctcattgttggaacggcctcgcccgacttggagtataccgggatccgacaataagtttaaagtgcctggcagaaagttttacgtccaccaccacgcctggaaaaccattaaggacgggaaccatcccacaacaggcaaagctattgaacaaagccctaataaccgcactgtagaagctctcgccggcgggaattcctttagcttcgaaattgcctttgagaacctgaaagaatgggagctgggtttgctcatccacagcctgcaactcgaaaagggtctggcgcataaacttggaatggcaaagtctatgggatttggttcagttgaaattgacgtcgaatcagtgcgcctgagaaaagattggaagcaatggcggaatggcaattccgaaattcccaactggttgggaaaaggatttgctaaactgaaggaatggttccgggacgagctcgattttatagaaaatcttaagaaacttctttggtttcctgagggcgaccaagcaccccgggtttgctaccccatgctgcgaaagaaggacgatcctaatgggaatagcggttacgaagaactcaaagacggggaattcaagaaagaagatcggcagaagaagctgaccacgccgtggacaccgtgggcaggatccggtgggtccggtagtggtggttccgggtccggtggaagttcggacttcgacgagttcgagcggcagctcaacgagaataaacaagagcgggacaaggagaaccggcatcggaagcgcagccacagccgctctcggagccgggaccgcaaacgccggagccggagccgcgaccggcgcaaccgggaccagcggagcgcctcccgggacaggcgacgacgcagcaaacctttgaccagaggcgctaaagaggagcacggtggactgattcgttccccccgccacgagaagaagaagaaggtccgtaaatactgggacgtgccacccccaggctttgagcacatcaccccaatgcagtacaaggccatgcaagctgcgggtcagattccagccactgctcttctccccaccatgacccctgacggtctggctgtgaccccaacgccggtgcccgtggtcgggagccagatgaccagacaagcccggcgcctctacgtgggcaacatcccctttggcatcactgaggaggccatgatggatttcttcaacgcccagatgcgcctgggggggctgacccaggcccctggcaacccagtgttggctgtgcagattaaccaggacaagaattttgcctttttggagttccgctcagtggacgagactacccaggctatggcctttgatggcatcatcttccagggccagtcactaaagatccgcaggcctcacgactaccagccgcttcctggcatgtcagagaacccctccgtctatgtgcctggggttgtgtccactgtggtccccgactctgcccacaagctgttcatcgggggcttacccaactacctgaacgatgaccaggtcaaagagctgctgacatcctttgggcccctcaaggccttcaacctggtcaaggacagtgccacggggctctccaagggctacgccttctgtgagtacgtggacatcaacgtcacggatcaggccattgcggggctgaacggcatgcagctgggggataagaagctgctggtccagagggcgagtgtgggagccaagaatgccacgctggtgagccccccgagcaccatcaatcagacgcctgtgaccctgcaagtgccgggcttgatgagctcccaggtgcagatgggcggccacccgactgaggtcctgtgcctcatgaacatggtgctgcctgaggagctgctggacgacgaggagtatgaggagatcgtggaggacgtgcgggacgagtgcagcaagtacgggcttgtcaagtccatcgagatcccccggcctgtggacggcgtcgaggtgcccggctgcggaaagatctttgtggagttcacctctgtgtttgactgccagaaagccatgcagggcctgacgggccgcaagttcgccaacagagtggttgtcacaaaatactgtgaccccgactcttatcaccgccgggacttctggaaacggacagccgacggaagcgagttcgagtcaccaaagaagaagcggaaagtc

SEQ ID NO: 584 - DNA, 6006 bp, synthetic construct
  source 1..6006: mol_type = other DNA
atgaaacggacagccgacggaagcgagttcgagtcaccaaagaagaagcggaaagtcacgactactatgaagatttcaattgaattcctcgagccgtttcggatgaccaaatggcaggaaagcactaggcgaaacaagaacaacaaggaatttgttcgcggccaagcttttgcaagatggcatagaaataagaaggataacacaaaagggcggccttacataactgggacattgctgcggtccgcagtaattagaagcgcggaaaacctgctgacattgagtgatgggaaaattagcgaaaagacatgttgtcctgggaaatttgatacggaagataaagacaggttgctgcaattgaggcagcggtccacccttcgttggaccgataagaacccctgtccagataacgctgaaacttactgcccgttttgcgaacttctcgggagatccggtaacgatggaaagaaggctgagaagaaggattggcgctttcgtattcattttggcaatctttcccttccagggaagcccgatttcgacgggccaaaagctataggcagccaacgggtacttaacagggtcgatttcaaatccggtaaggcccatgacttctttaaggcttacgaagtcgaccatactaggtttccccgcttcgaaggggagattaccatagataataaagtcagcgctgaagccaggaaactgctctgtgattctctcaagtttacggatcggctgtgtggagctctgtgcgtaatcaggttcgatgaatatacaccagcagccgatagtgggaaacaaaccgaaaatgtccaagcagaaccgaatgctaatctcgctgaaaagaccgcagagcaaattattagcattctggacgataataagaaaaccgaatatacccgcctgcttgctgatgctattcgttcactccgccgctctagtaaacttgtcgctggcttgccaaaggatcatgacgggaaggatgaccattacctctgggatatcggcaagaagaagaaagacgaaaactctgtcactattaggcaaatccttacgacctcagcagacaccaaggaactcaagaatgccggaaaatggagagaattctgcgagaagctgggtgaagcgctgtacctcaagagtaaagacatgagtggcggcctgaaaattactcggagaatactgggcgatgctgaattccatggaaagcccgatcggcttgaaaagagccggtctgtgtcaatcggatctgtgttgaaagaaactgtggtatgcggcgaactggtcgctaaaacgcccttcttcttcggagcgatagacgaagatgcaaaacaaaccgacctgcaagtactcctcactcccgataacaagtatagactgccaagaagcgccgtgcgaggtatactccgtcgagatcttcaaacctattttgatagcccatgcaatgctgagttgggtggacggccatgcatgtgtaagacgtgtaggattatgagagggatcacggtgatggatgcgcgcagtgagtacaatgccccgccagaaataaggcatcgtacccgcattaatcccttcacaggcacggttgcggaaggtgccctgtttaatatggaagtagcccccgaggggattgtctttccatttcaactccggtaccggggctctgaagatgggctgcccgatgcactgaaaacggtgttgaaatggtgggctgaggggcaggcattcatgagtggcgctgcctcaaccgggaagggccgattccggatggaaaatgctaaatatgaaacgctggatctgagcgacgagaatcaaaggaatgactatcttaagaattggggatggcgtgacgagaaggggctcgaggaactgaagaaacgactgaactcaggtctgccagagcccggtaattatagggatccaaaatggcacgagattaacgtttccattgagatggcaagcccttttattaatggcgacccaatccgcgcagccgtggacaaacgtggtacagatgtggttaccttcgttaagtataaagctgaaggggaagaggcgaaacccgtatgtgcatacaaggccgaatcttttagaggggtgatcagaagtgccgtggcacgcattcatatggaagatggcgtccctttgactgagttgactcacagtgactgtgaatgtctcctgtgccaaatctttggaagtgagtatgaagccggcaaaataaggtttgaagatctcgtattcgaaagtgacccggaacctgtgaccttcgatcatgtggccatcgatagattcactggcggtgcagctgataagaagaaattcgatgattcccctctgcccggtagccctgcaagaccgctcatgttgaaaggctccttctggatccgcagggacgttctcgaggacgaagagtactgtaaggcactcggtaaggctcttgcagatgtgaataatggcctttatcccctcggtggaaagagcgccatcggctacggacaggtcaagagtctgggtataaagggagatgataagaggatttctcgcctcatgaatcctgcctttgatgagacagatgtagccgttccagaaaagcccaaaactgatgccgaggttcgcatcgaggcagagaaagtatattacccacactatttcgtcgaaccccataagaaggtggaacgcgaggagaaaccctgtggtcatcaaaagttccacgaggggcgactgacaggtaaaattcggtgtaagctcattaccaagacacccctcatcgtcccagatactagtaatgacgatttcttcagacctgcggataaagaagctcggaaggaaaaggacgaatatcataaatcatatgctttcttcagacttcataaacaaatcatgattcccgggagcgaattgagaggaatggtgagtagtgtctacgaaactgtgacaaattcttgcttcaggatatttgatgagactaaacggttgtcatggcggatggatgctgatcaccagaatgtgctgcaagactttctcccaggtcgagtgaccgccgatgggaaacatatacaaaagttttccgaaactgcaagggtgcctttctatgacaaaacgcagaaacattttgacattcttgatgagcaagaaattgctggtgagaaacctgttcggatgtgggtcaagcgttttattaaacgactgagcctcgttgatcctgctaaacacccccagaagaaacaagacaataaatggaaaagacgcaaagaaggcatcgccacatttatagagcaaaagaatggctcttattattttaacgtggtcaccaataatggctgcacttctttccacttgtggcataaacctgacaattttgaccaggagaaactcgaaggcatacagaatggtgagaaactggattgctgggtaagagatagtagataccaaaaggcctttcaagagatacccgagaacgacccagacggatgggagtgtaaagagggctaccttcatgtcgtcggccccagcaaagtagagtttagtgacaagaaaggggatgtgatcaataactttcaaggaacactcccatcagttcccaacgactggaaaacaattaggacgaacgattttaagaataggaaaaggaagaatgaacctgtgttttgttgtgaggatgataagggcaattactataccatggctaaatattgcgaaaccttcttcttcgatctgaaggagaacgaggaatacgagatccccgagaaagcaagaatcaaatacaaagaactgctcagggtctataacaacaatcctcaagcagtgccggagagcgtatttcagtctagagttgcccgggaaaacgtggaaaagctgaagtccggagatcttgtgtatttcaaacataatgaaaagtacgtagaggacatcgtcccagtgcggatttcccgaactgtagacgataggatgatcggcaaacgtatgagcgccgatctgcggccgtgccatggagattgggtggaagatggtgatctcagtgccttgaatgcatatcccgagaaaagactcctcttgcgccaccccaaaggactctgccctgcttgccggctctttggaaccggatcttacaagggcagagtcaggtttggattcgcgtcactcgaaaacgatccggagtggctgatcccaggcaagaatcccggcgatccgtttcacggcgggccggtgatgctctcattgttggaacggcctcgcccgacttggagtataccgggatccgacaataagtttaaagtgcctggcagaaagttttacgtccaccaccacgcctggaaaaccattaaggacgggaaccatcccacaacaggcaaagctattgaacaaagccctaataaccgcactgtagaagctctcgccggcgggaattcctttagcttcgaaattgcctttgagaacctgaaagaatgggagctgggtttgctcatccacagcctgcaactcgaaaagggtctggcgcataaacttggaatggcaaagtctatgggatttggttcagttgaaattgacgtcgaatcagtgcgcctgagaaaagattggaagcaatggcggaatggcaattccgaaattcccaactggttgggaaaaggatttgctaaactgaaggaatggttccgggacgagctcgattttatagaaaatcttaagaaacttctttggtttcctgagggcgaccaagcaccccgggtttgctaccccatgctgcgaaagaaggacgatcctaatgggaatagcggttacgaagaactcaaagacggggaattcaagaaagaagatcggcagaagaagctgaccacgccgtggacaccgtgggcaatggcgatgcaagcggccaagagggcgaacattcgacttccacctgaagtaaatcggatattgtatataagaaatttgccatacaaaatcacagctgaagaaatgtatgatatatttgggaaatatggacctattcgtcaaatcagagtggggaacacacctgaaactagaggaacagcttatgtggtctatgaggacatctttgatgccaagaatgcatgtgatcacctatcgggattcaatgtttgtaacagataccttgtggttttgtactataatgccaacagggcatttcagaagatggacacaaagaagaaggaggaacagttgaagcttctcaaggagaaatatggcatcaacacagatccaccaaaaatggcggagtatctggcctccatcttcggcaccgagaaagacaaagtcaactgttcattttatttcaaaattggagcatgtcgtcatggagacaggtgctctcggttgcacaataaaccgacgtttagccagaccattgccctcttgaacatttaccgtaaccctcaaaactcttcccagtctgctgacggtttgcgctgtgccgtgagcgatgtggagatgcaggaacactatgatgagttttttgaggaggtttttacagaaatggaggagaagtatggggaagtagaggagatgaacgtctgtgacaacctgggagaccacctggtggggaacgtgtacgtcaagtttcgccgtgaggaagatgcggaaaaggctgtgattgacttgaataaccgttggtttaatggacagccgctccacgccgagctgtcacccgtgacggacttcagagaagcctgctgccgtcagtatgagatgggagaatgcacacgaggcggcttctgcaacttcatgcatttgaagcccatttccagagagctgcggcgggagctgtatggccgccgtcgcaagaagcatagatcaagatcccgatcccgggagcgtcgttctcggtctagagaccgtggtcgtggcggtggcggtggcggtggtggaggtggcggcggacgggagcgtgacaggaggcggtcgagagatcgtgaaagatctgggcgattcaaacggacagccgacggaagcgagttcgagtcaccaaagaagaagcggaaagtc

SEQ ID NO: 585 - DNA, 6834 bp, synthetic construct
  source 1..6834: mol_type = other DNA
atgaaacggacagccgacggaagcgagttcgagtcaccaaagaagaagcggaaagtcacgactactatgaagatttcaattgaattcctcgagccgtttcggatgaccaaatggcaggaaagcactaggcgaaacaagaacaacaaggaatttgttcgcggccaagcttttgcaagatggcatagaaataagaaggataacacaaaagggcggccttacataactgggacattgctgcggtccgcagtaattagaagcgcggaaaacctgctgacattgagtgatgggaaaattagcgaaaagacatgttgtcctgggaaatttgatacggaagataaagacaggttgctgcaattgaggcagcggtccacccttcgttggaccgataagaacccctgtccagataacgctgaaacttactgcccgttttgcgaacttctcgggagatccggtaacgatggaaagaaggctgagaagaaggattggcgctttcgtattcattttggcaatctttcccttccagggaagcccgatttcgacgggccaaaagctataggcagccaacgggtacttaacagggtcgatttcaaatccggtaaggcccatgacttctttaaggcttacgaagtcgaccatactaggtttccccgcttcgaaggggagattaccatagataataaagtcagcgctgaagccaggaaactgctctgtgattctctcaagtttacggatcggctgtgtggagctctgtgcgtaatcaggttcgatgaatatacaccagcagccgatagtgggaaacaaaccgaaaatgtccaagcagaaccgaatgctaatctcgctgaaaagaccgcagagcaaattattagcattctggacgataataagaaaaccgaatatacccgcctgcttgctgatgctattcgttcactccgccgctctagtaaacttgtcgctggcttgccaaaggatcatgacgggaaggatgaccattacctctgggatatcggcaagaagaagaaagacgaaaactctgtcactattaggcaaatccttacgacctcagcagacaccaaggaactcaagaatgccggaaaatggagagaattctgcgagaagctgggtgaagcgctgtacctcaagagtaaagacatgagtggcggcctgaaaattactcggagaatactgggcgatgctgaattccatggaaagcccgatcggcttgaaaagagccggtctgtgtcaatcggatctgtgttgaaagaaactgtggtatgcggcgaactggtcgctaaaacgcccttcttcttcggagcgatagacgaagatgcaaaacaaaccgacctgcaagtactcctcactcccgataacaagtatagactgccaagaagcgccgtgcgaggtatactccgtcgagatcttcaaacctattttgatagcccatgcaatgctgagttgggtggacggccatgcatgtgtaagacgtgtaggattatgagagggatcacggtgatggatgcgcgcagtgagtacaatgccccgccagaaataaggcatcgtacccgcattaatcccttcacaggcacggttgcggaaggtgccctgtttaatatggaagtagcccccgaggggattgtctttccatttcaactccggtaccggggctctgaagatgggctgcccgatgcactgaaaacggtgttgaaatggtgggctgaggggcaggcattcatgagtggcgctgcctcaaccgggaagggccgattccggatggaaaatgctaaatatgaaacgctggatctgagcgacgagaatcaaaggaatgactatcttaagaattggggatggcgtgacgagaaggggctcgaggaactgaagaaacgactgaactcaggtctgccagagcccggtaattatagggatccaaaatggcacgagattaacgtttccattgagatggcaagcccttttattaatggcgacccaatccgcgcagccgtggacaaacgtggtacagatgtggttaccttcgttaagtataaagctgaaggggaagaggcgaaacccgtatgtgcatacaaggccgaatcttttagaggggtgatcagaagtgccgtggcacgcattcatatggaagatggcgtccctttgactgagttgactcacagtgactgtgaatgtctcctgtgccaaatctttggaagtgagtatgaagccggcaaaataaggtttgaagatctcgtattcgaaagtgacccggaacctgtgaccttcgatcatgtggccatcgatagattcactggcggtgcagctgataagaagaaattcgatgattcccctctgcccggtagccctgcaagaccgctcatgttgaaaggctccttctggatccgcagggacgttctcgaggacgaagagtactgtaaggcactcggtaaggctcttgcagatgtgaataatggcctttatcccctcggtggaaagagcgccatcggctacggacaggtcaagagtctgggtataaagggagatgataagaggatttctcgcctcatgaatcctgcctttgatgagacagatgtagccgttccagaaaagcccaaaactgatgccgaggttcgcatcgaggcagagaaagtatattacccacactatttcgtcgaaccccataagaaggtggaacgcgaggagaaaccctgtggtcatcaaaagttccacgaggggcgactgacaggtaaaattcggtgtaagctcattaccaagacacccctcatcgtcccagatactagtaatgacgatttcttcagacctgcggataaagaagctcggaaggaaaaggacgaatatcataaatcatatgctttcttcagacttcataaacaaatcatgattcccgggagcgaattgagaggaatggtgagtagtgtctacgaaactgtgacaaattcttgcttcaggatatttgatgagactaaacggttgtcatggcggatggatgctgatcaccagaatgtgctgcaagactttctcccaggtcgagtgaccgccgatgggaaacatatacaaaagttttccgaaactgcaagggtgcctttctatgacaaaacgcagaaacattttgacattcttgatgagcaagaaattgctggtgagaaacctgttcggatgtgggtcaagcgttttattaaacgactgagcctcgttgatcctgctaaacacccccagaagaaacaagacaataaatggaaaagacgcaaagaaggcatcgccacatttatagagcaaaagaatggctcttattattttaacgtggtcaccaataatggctgcacttctttccacttgtggcataaacctgacaattttgaccaggagaaactcgaaggcatacagaatggtgagaaactggattgctgggtaagagatagtagataccaaaaggcctttcaagagatacccgagaacgacccagacggatgggagtgtaaagagggctaccttcatgtcgtcggccccagcaaagtagagtttagtgacaagaaaggggatgtgatcaataactttcaaggaacactcccatcagttcccaacgactggaaaacaattaggacgaacgattttaagaataggaaaaggaagaatgaacctgtgttttgttgtgaggatgataagggcaattactataccatggctaaatattgcgaaaccttcttcttcgatctgaaggagaacgaggaatacgagatccccgagaaagcaagaatcaaatacaaagaactgctcagggtctataacaacaatcctcaagcagtgccggagagcgtatttcagtctagagttgcccgggaaaacgtggaaaagctgaagtccggagatcttgtgtatttcaaacataatgaaaagtacgtagaggacatcgtcccagtgcggatttcccgaactgtagacgataggatgatcggcaaacgtatgagcgccgatctgcggccgtgccatggagattgggtggaagatggtgatctcagtgccttgaatgcatatcccgagaaaagactcctcttgcgccaccccaaaggactctgccctgcttgccggctctttggaaccggatcttacaagggcagagtcaggtttggattcgcgtcactcgaaaacgatccggagtggctgatcccaggcaagaatcccggcgatccgtttcacggcgggccggtgatgctctcattgttggaacggcctcgcccgacttggagtataccgggatccgacaataagtttaaagtgcctggcagaaagttttacgtccaccaccacgcctggaaaaccattaaggacgggaaccatcccacaacaggcaaagctattgaacaaagccctaataaccgcactgtagaagctctcgccggcgggaattcctttagcttcgaaattgcctttgagaacctgaaagaatgggagctgggtttgctcatccacagcctgcaactcgaaaagggtctggcgcataaacttggaatggcaaagtctatgggatttggttcagttgaaattgacgtcgaatcagtgcgcctgagaaaagattggaagcaatggcggaatggcaattccgaaattcccaactggttgggaaaaggatttgctaaactgaaggaatggttccgggacgagctcgattttatagaaaatcttaagaaacttctttggtttcctgagggcgaccaagcaccccgggtttgctaccccatgctgcgaaagaaggacgatcctaatgggaatagcggttacgaagaactcaaagacggggaattcaagaaagaagatcggcagaagaagctgaccacgccgtggacaccgtgggcaatggcggagtatctggcctccatcttcggcaccgagaaagacaaagtcaactgttcattttatttcaaaattggagcatgtcgtcatggagacaggtgctctcggttgcacaataaaccgacgtttagccagaccattgccctcttgaacatttaccgtaaccctcaaaactcttcccagtctgctgacggtttgcgctgtgccgtgagcgatgtggagatgcaggaacactatgatgagttttttgaggaggtttttacagaaatggaggagaagtatggggaagtagaggagatgaacgtctgtgacaacctgggagaccacctggtggggaacgtgtacgtcaagtttcgccgtgaggaagatgcggaaaaggctgtgattgacttgaataaccgttggtttaatggacagccgctccacgccgagctgtcacccgtgacggacttcagagaagcctgctgccgtcagtatgagatgggagaatgcacacgaggcggcttctgcaacttcatgcatttgaagcccatttccagagagctgcggcgggagctgtatggccgccgtcgcaagaagcatagatcaagatcccgatcccgggagcgtcgttctcggtctagagaccgtggtcgtggcggtggcggtggcggtggtggaggtggcggcggacgggagcgtgacaggaggcggtcgagagatcgtgaaagatctgggcgattcatgtccctgtacgatgacctaggagtggagaccagtgactcaaaaacagaaggctggtccaaaaacttcaaacttctgcagtctcagcttcaggtgaagaaggcagctctcactcaggcaaagagccaaaggacgaaacaaagtacagtcctcgccccagtcattgacctgaagcgaggtggctcctcagatgaccggcaaattgtggacactccaccgcatgtagcagctgggctgaaggatcctgttcccagtgggttttctgcaggggaagttctgattcccttagctgacgaatatgaccctatgtttcctaatgattatgagaaagtagtgaagcgccaaagagaggaacgacagagacagcgggagctggaaagacaaaaggaaatagaagaaagggaaaaaaggcgtaaagacagacatgaagcaagtgggtttgcaaggagaccagatccagattctgatgaagatgaagattatgagcgagagaggaggaaaagaagtatgggcggagctgccattgccccacccacttctctggtagagaaagacaaagagttaccccgagattttccttatgaagaggactcaagacctcgatcacagtcttccaaagcagccattcctcccccagtgtacgaggaacaagacagaccgagatctccaaccggacctagcaactccttcctcgctaacatggggggcacggtggcgcacaagatcatgcagaagtacggcttccgggagggccagggtctggggaagcatgagcagggcctgagcactgccttgtcagtggagaagaccagcaagcgtggcggcaagatcatcgtgggcgacgccacagagaaagatgcatccaagaagtcagattcaaatccgctgactgaaatacttaagtgtcctactaaagtggtcttactaaggaacatggttggtgcgggagaggtggatgaagacttggaagttgaaaccaaggaagaatgtgaaaaatatggcaaagttggaaaatgtgtgatatttgaaattcctggtgcccctgatgatgaagcagtacggatatttttagaatttgagagagttgaatcagcaattaaagcggttgttgacttgaatgggaggtattttggtggacgggtggtaaaagcatgtttctacaatttggacaaattcagggtcttggatttggcagaacaagttaaacggacagccgacggaagcgagttcgagtcaccaaagaagaagcggaaagtc

SEQ ID NO: 586 - DNA, 6006 bp, synthetic construct
  source 1..6006: mol_type = other DNA
atgaaacggacagccgacggaagcgagttcgagtcaccaaagaagaagcggaaagtcacgactactatgaagatttcaattgaattcctcgagccgtttcggatgaccaaatggcaggaaagcactaggcgaaacaagaacaacaaggaatttgttcgcggccaagcttttgcaagatggcatagaaataagaaggataacacaaaagggcggccttacataactgggacattgctgcggtccgcagtaattagaagcgcggaaaacctgctgacattgagtgatgggaaaattagcgaaaagacatgttgtcctgggaaatttgatacggaagataaagacaggttgctgcaattgaggcagcggtccacccttcgttggaccgataagaacccctgtccagataacgctgaaacttactgcccgttttgcgaacttctcgggagatccggtaacgatggaaagaaggctgagaagaaggattggcgctttcgtattcattttggcaatctttcccttccagggaagcccgatttcgacgggccaaaagctataggcagccaacgggtacttaacagggtcgatttcaaatccggtaaggcccatgacttctttaaggcttacgaagtcgaccatactaggtttccccgcttcgaaggggagattaccatagataataaagtcagcgctgaagccaggaaactgctctgtgattctctcaagtttacggatcggctgtgtggagctctgtgcgtaatcaggttcgatgaatatacaccagcagccgatagtgggaaacaaaccgaaaatgtccaagcagaaccgaatgctaatctcgctgaaaagaccgcagagcaaattattagcattctggacgataataagaaaaccgaatatacccgcctgcttgctgatgctattcgttcactccgccgctctagtaaacttgtcgctggcttgccaaaggatcatgacgggaaggatgaccattacctctgggatatcggcaagaagaagaaagacgaaaactctgtcactattaggcaaatccttacgacctcagcagacaccaaggaactcaagaatgccggaaaatggagagaattctgcgagaagctgggtgaagcgctgtacctcaagagtaaagacatgagtggcggcctgaaaattactcggagaatactgggcgatgctgaattccatggaaagcccgatcggcttgaaaagagccggtctgtgtcaatcggatctgtgttgaaagaaactgtggtatgcggcgaactggtcgctaaaacgcccttcttcttcggagcgatagacgaagatgcaaaacaaaccgacctgcaagtactcctcactcccgataacaagtatagactgccaagaagcgccgtgcgaggtatactccgtcgagatcttcaaacctattttgatagcccatgcaatgctgagttgggtggacggccatgcatgtgtaagacgtgtaggattatgagagggatcacggtgatggatgcgcgcagtgagtacaatgccccgccagaaataaggcatcgtacccgcattaatcccttcacaggcacggttgcggaaggtgccctgtttaatatggaagtagcccccgaggggattgtctttccatttcaactccggtaccggggctctgaagatgggctgcccgatgcactgaaaacggtgttgaaatggtgggctgaggggcaggcattcatgagtggcgctgcctcaaccgggaagggccgattccggatggaaaatgctaaatatgaaacgctggatctgagcgacgagaatcaaaggaatgactatcttaagaattggggatggcgtgacgagaaggggctcgaggaactgaagaaacgactgaactcaggtctgccagagcccggtaattatagggatccaaaatggcacgagattaacgtttccattgagatggcaagcccttttattaatggcgacccaatccgcgcagccgtggacaaacgtggtacagatgtggttaccttcgttaagtataaagctgaaggggaagaggcgaaacccgtatgtgcatacaaggccgaatcttttagaggggtgatcagaagtgccgtggcacgcattcatatggaagatggcgtccctttgactgagttgactcacagtgactgtgaatgtctcctgtgccaaatctttggaagtgagtatgaagccggcaaaataaggtttgaagatctcgtattcgaaagtgacccggaacctgtgaccttcgatcatgtggccatcgatagattcactggcggtgcagctgataagaagaaattcgatgattcccctctgcccggtagccctgcaagaccgctcatgttgaaaggctccttctggatccgcagggacgttctcgaggacgaagagtactgtaaggcactcggtaaggctcttgcagatgtgaataatggcctttatcccctcggtggaaagagcgccatcggctacggacaggtcaagagtctgggtataaagggagatgataagaggatttctcgcctcatgaatcctgcctttgatgagacagatgtagccgttccagaaaagcccaaaactgatgccgaggttcgcatcgaggcagagaaagtatattacccacactatttcgtcgaaccccataagaaggtggaacgcgaggagaaaccctgtggtcatcaaaagttccacgaggggcgactgacaggtaaaattcggtgtaagctcattaccaagacacccctcatcgtcccagatactagtaatgacgatttcttcagacctgcggataaagaagctcggaaggaaaaggacgaatatcataaatcatatgctttcttcagacttcataaacaaatcatgattcccgggagcgaattgagaggaatggtgagtagtgtctacgaaactgtgacaaattcttgcttcaggatatttgatgagactaaacggttgtcatggcggatggatgctgatcaccagaatgtgctgcaagactttctcccaggtcgagtgaccgccgatgggaaacatatacaaaagttttccgaaactgcaagggtgcctttctatgacaaaacgcagaaacattttgacattcttgatgagcaagaaattgctggtgagaaacctgttcggatgtgggtcaagcgttttattaaacgactgagcctcgttgatcctgctaaacacccccagaagaaacaagacaataaatggaaaagacgcaaagaaggcatcgccacatttatagagcaaaagaatggctcttattattttaacgtggtcaccaataatggctgcacttctttccacttgtggcataaacctgacaattttgaccaggagaaactcgaaggcatacagaatggtgagaaactggattgctgggtaagagatagtagataccaaaaggcctttcaagagatacccgagaacgacccagacggatgggagtgtaaagagggctaccttcatgtcgtcggccccagcaaagtagagtttagtgacaagaaaggggatgtgatcaataactttcaaggaacactcccatcagttcccaacgactggaaaacaattaggacgaacgattttaagaataggaaaaggaagaatgaacctgtgttttgttgtgaggatgataagggcaattactataccatggctaaatattgcgaaaccttcttcttcgatctgaaggagaacgaggaatacgagatccccgagaaagcaagaatcaaatacaaagaactgctcagggtctataacaacaatcctcaagcagtgccggagagcgtatttcagtctagagttgcccgggaaaacgtggaaaagctgaagtccggagatcttgtgtatttcaaacataatgaaaagtacgtagaggacatcgtcccagtgcggatttcccgaactgtagacgataggatgatcggcaaacgtatgagcgccgatctgcggccgtgccatggagattgggtggaagatggtgatctcagtgccttgaatgcatatcccgagaaaagactcctcttgcgccaccccaaaggactctgccctgcttgccggctctttggaaccggatcttacaagggcagagtcaggtttggattcgcgtcactcgaaaacgatccggagtggctgatcccaggcaagaatcccggcgatccgtttcacggcgggccggtgatgctctcattgttggaacggcctcgcccgacttggagtataccgggatccgacaataagtttaaagtgcctggcagaaagttttacgtccaccaccacgcctggaaaaccattaaggacgggaaccatcccacaacaggcaaagctattgaacaaagccctaataaccgcactgtagaagctctcgccggcgggaattcctttagcttcgaaattgcctttgagaacctgaaagaatgggagctgggtttgctcatccacagcctgcaactcgaaaagggtctggcgcataaacttggaatggcaaagtctatgggatttggttcagttgaaattgacgtcgaatcagtgcgcctgagaaaagattggaagcaatggcggaatggcaattccgaaattcccaactggttgggaaaaggatttgctaaactgaaggaatggttccgggacgagctcgattttatagaaaatcttaagaaacttctttggtttcctgagggcgaccaagcaccccgggtttgctaccccatgctgcgaaagaaggacgatcctaatgggaatagcggttacgaagaactcaaagacggggaattcaagaaagaagatcggcagaagaagctgaccacgccgtggacaccgtgggcaatggcggagtatctggcctccatcttcggcaccgagaaagacaaagtcaactgttcattttatttcaaaattggagcatgtcgtcatggagacaggtgctctcggttgcacaataaaccgacgtttagccagaccattgccctcttgaacatttaccgtaaccctcaaaactcttcccagtctgctgacggtttgcgctgtgccgtgagcgatgtggagatgcaggaacactatgatgagttttttgaggaggtttttacagaaatggaggagaagtatggggaagtagaggagatgaacgtctgtgacaacctgggagaccacctggtggggaacgtgtacgtcaagtttcgccgtgaggaagatgcggaaaaggctgtgattgacttgaataaccgttggtttaatggacagccgctccacgccgagctgtcacccgtgacggacttcagagaagcctgctgccgtcagtatgagatgggagaatgcacacgaggcggcttctgcaacttcatgcatttgaagcccatttccagagagctgcggcgggagctgtatggccgccgtcgcaagaagcatagatcaagatcccgatcccgggagcgtcgttctcggtctagagaccgtggtcgtggcggtggcggtggcggtggtggaggtggcggcggacgggagcgtgacaggaggcggtcgagagatcgtgaaagatctgggcgattcatggcgatgcaagcggccaagagggcgaacattcgacttccacctgaagtaaatcggatattgtatataagaaatttgccatacaaaatcacagctgaagaaatgtatgatatatttgggaaatatggacctattcgtcaaatcagagtggggaacacacctgaaactagaggaacagcttatgtggtctatgaggacatctttgatgccaagaatgcatgtgatcacctatcgggattcaatgtttgtaacagataccttgtggttttgtactataatgccaacagggcatttcagaagatggacacaaagaagaaggaggaacagttgaagcttctcaaggagaaatatggcatcaacacagatccaccaaaaaaacggacagccgacggaagcgagttcgagtcaccaaagaagaagcggaaagtc

SEQ ID NO: 587 - DNA, 7056 bp, synthetic construct
  source 1..7056: mol_type = other DNA
atgaaacggacagccgacggaagcgagttcgagtcaccaaagaagaagcggaaagtcacgactactatgaagatttcaattgaattcctcgagccgtttcggatgaccaaatggcaggaaagcactaggcgaaacaagaacaacaaggaatttgttcgcggccaagcttttgcaagatggcatagaaataagaaggataacacaaaagggcggccttacataactgggacattgctgcggtccgcagtaattagaagcgcggaaaacctgctgacattgagtgatgggaaaattagcgaaaagacatgttgtcctgggaaatttgatacggaagataaagacaggttgctgcaattgaggcagcggtccacccttcgttggaccgataagaacccctgtccagataacgctgaaacttactgcccgttttgcgaacttctcgggagatccggtaacgatggaaagaaggctgagaagaaggattggcgctttcgtattcattttggcaatctttcccttccagggaagcccgatttcgacgggccaaaagctataggcagccaacgggtacttaacagggtcgatttcaaatccggtaaggcccatgacttctttaaggcttacgaagtcgaccatactaggtttccccgcttcgaaggggagattaccatagataataaagtcagcgctgaagccaggaaactgctctgtgattctctcaagtttacggatcggctgtgtggagctctgtgcgtaatcaggttcgatgaatatacaccagcagccgatagtgggaaacaaaccgaaaatgtccaagcagaaccgaatgctaatctcgctgaaaagaccgcagagcaaattattagcattctggacgataataagaaaaccgaatatacccgcctgcttgctgatgctattcgttcactccgccgctctagtaaacttgtcgctggcttgccaaaggatcatgacgggaaggatgaccattacctctgggatatcggcaagaagaagaaagacgaaaactctgtcactattaggcaaatccttacgacctcagcagacaccaaggaactcaagaatgccggaaaatggagagaattctgcgagaagctgggtgaagcgctgtacctcaagagtaaagacatgagtggcggcctgaaaattactcggagaatactgggcgatgctgaattccatggaaagcccgatcggcttgaaaagagccggtctgtgtcaatcggatctgtgttgaaagaaactgtggtatgcggcgaactggtcgctaaaacgcccttcttcttcggagcgatagacgaagatgcaaaacaaaccgacctgcaagtactcctcactcccgataacaagtatagactgccaagaagcgccgtgcgaggtatactccgtcgagatcttcaaacctattttgatagcccatgcaatgctgagttgggtggacggccatgcatgtgtaagacgtgtaggattatgagagggatcacggtgatggatgcgcgcagtgagtacaatgccccgccagaaataaggcatcgtacccgcattaatcccttcacaggcacggttgcggaaggtgccctgtttaatatggaagtagcccccgaggggattgtctttccatttcaactccggtaccggggctctgaagatgggctgcccgatgcactgaaaacggtgttgaaatggtgggctgaggggcaggcattcatgagtggcgctgcctcaaccgggaagggccgattccggatggaaaatgctaaatatgaaacgctggatctgagcgacgagaatcaaaggaatgactatcttaagaattggggatggcgtgacgagaaggggctcgaggaactgaagaaacgactgaactcaggtctgccagagcccggtaattatagggatccaaaatggcacgagattaacgtttccattgagatggcaagcccttttattaatggcgacccaatccgcgcagccgtggacaaacgtggtacagatgtggttaccttcgttaagtataaagctgaaggggaagaggcgaaacccgtatgtgcatacaaggccgaatcttttagaggggtgatcagaagtgccgtggcacgcattcatatggaagatggcgtccctttgactgagttgactcacagtgactgtgaatgtctcctgtgccaaatctttggaagtgagtatgaagccggcaaaataaggtttgaagatctcgtattcgaaagtgacccggaacctgtgaccttcgatcatgtggccatcgatagattcactggcggtgcagctgataagaagaaattcgatgattcccctctgcccggtagccctgcaagaccgctcatgttgaaaggctccttctggatccgcagggacgttctcgaggacgaagagtactgtaaggcactcggtaaggctcttgcagatgtgaataatggcctttatcccctcggtggaaagagcgccatcggctacggacaggtcaagagtctgggtataaagggagatgataagaggatttctcgcctcatgaatcctgcctttgatgagacagatgtagccgttccagaaaagcccaaaactgatgccgaggttcgcatcgaggcagagaaagtatattacccacactatttcgtcgaaccccataagaaggtggaacgcgaggagaaaccctgtggtcatcaaaagttccacgaggggcgactgacaggtaaaattcggtgtaagctcattaccaagacacccctcatcgtcccagatactagtaatgacgatttcttcagacctgcggataaagaagctcggaaggaaaaggacgaatatcataaatcatatgctttcttcagacttcataaacaaatcatgattcccgggagcgaattgagaggaatggtgagtagtgtctacgaaactgtgacaaattcttgcttcaggatatttgatgagactaaacggttgtcatggcggatggatgctgatcaccagaatgtgctgcaagactttctcccaggtcgagtgaccgccgatgggaaacatatacaaaagttttccgaaactgcaagggtgcctttctatgacaaaacgcagaaacattttgacattcttgatgagcaagaaattgctggtgagaaacctgttcggatgtgggtcaagcgttttattaaacgactgagcctcgttgatcctgctaaacacccccagaagaaacaagacaataaatggaaaagacgcaaagaaggcatcgccacatttatagagcaaaagaatggctcttattattttaacgtggtcaccaataatggctgcacttctttccacttgtggcataaacctgacaattttgaccaggagaaactcgaaggcatacagaatggtgagaaactggattgctgggtaagagatagtagataccaaaaggcctttcaagagatacccgagaacgacccagacggatgggagtgtaaagagggctaccttcatgtcgtcggccccagcaaagtagagtttagtgacaagaaaggggatgtgatcaataactttcaaggaacactcccatcagttcccaacgactggaaaacaattaggacgaacgattttaagaataggaaaaggaagaatgaacctgtgttttgttgtgaggatgataagggcaattactataccatggctaaatattgcgaaaccttcttcttcgatctgaaggagaacgaggaatacgagatccccgagaaagcaagaatcaaatacaaagaactgctcagggtctataacaacaatcctcaagcagtgccggagagcgtatttcagtctagagttgcccgggaaaacgtggaaaagctgaagtccggagatcttgtgtatttcaaacataatgaaaagtacgtagaggacatcgtcccagtgcggatttcccgaactgtagacgataggatgatcggcaaacgtatgagcgccgatctgcggccgtgccatggagattgggtggaagatggtgatctcagtgccttgaatgcatatcccgagaaaagactcctcttgcgccaccccaaaggactctgccctgcttgccggctctttggaaccggatcttacaagggcagagtcaggtttggattcgcgtcactcgaaaacgatccggagtggctgatcccaggcaagaatcccggcgatccgtttcacggcgggccggtgatgctctcattgttggaacggcctcgcccgacttggagtataccgggatccgacaataagtttaaagtgcctggcagaaagttttacgtccaccaccacgcctggaaaaccattaaggacgggaaccatcccacaacaggcaaagctattgaacaaagccctaataaccgcactgtagaagctctcgccggcgggaattcctttagcttcgaaattgcctttgagaacctgaaagaatgggagctgggtttgctcatccacagcctgcaactcgaaaagggtctggcgcataaacttggaatggcaaagtctatgggatttggttcagttgaaattgacgtcgaatcagtgcgcctgagaaaagattggaagcaatggcggaatggcaattccgaaattcccaactggttgggaaaaggatttgctaaactgaaggaatggttccgggacgagctcgattttatagaaaatcttaagaaacttctttggtttcctgagggcgaccaagcaccccgggtttgctaccccatgctgcgaaagaaggacgatcctaatgggaatagcggttacgaagaactcaaagacggggaattcaagaaagaagatcggcagaagaagctgaccacgccgtggacaccgtgggcaatggcggagtatctggcctccatcttcggcaccgagaaagacaaagtcaactgttcattttatttcaaaattggagcatgtcgtcatggagacaggtgctctcggttgcacaataaaccgacgtttagccagaccattgccctcttgaacatttaccgtaaccctcaaaactcttcccagtctgctgacggtttgcgctgtgccgtgagcgatgtggagatgcaggaacactatgatgagttttttgaggaggtttttacagaaatggaggagaagtatggggaagtagaggagatgaacgtctgtgacaacctgggagaccacctggtggggaacgtgtacgtcaagtttcgccgtgaggaagatgcggaaaaggctgtgattgacttgaataaccgttggtttaatggacagccgctccacgccgagctgtcacccgtgacggacttcagagaagcctgctgccgtcagtatgagatgggagaatgcacacgaggcggcttctgcaacttcatgcatttgaagcccatttccagagagctgcggcgggagctgtatggccgccgtcgcaagaagcatagatcaagatcccgatcccgggagcgtcgttctcggtctagagaccgtggtcgtggcggtggcggtggcggtggtggaggtggcggcggacgggagcgtgacaggaggcggtcgagagatcgtgaaagatctgggcgattcatgtcggacttcgacgagttcgagcggcagctcaacgagaataaacaagagcgggacaaggagaaccggcatcggaagcgcagccacagccgctctcggagccgggaccgcaaacgccggagccggagccgcgaccggcgcaaccgggaccagcggagcgcctcccgggacaggcgacgacgcagcaaacctttgaccagaggcgctaaagaggagcacggtggactgattcgttccccccgccacgagaagaagaagaaggtccgtaaatactgggacgtgccacccccaggctttgagcacatcaccccaatgcagtacaaggccatgcaagctgcgggtcagattccagccactgctcttctccccaccatgacccctgacggtctggctgtgaccccaacgccggtgcccgtggtcgggagccagatgaccagacaagcccggcgcctctacgtgggcaacatcccctttggcatcactgaggaggccatgatggatttcttcaacgcccagatgcgcctgggggggctgacccaggcccctggcaacccagtgttggctgtgcagattaaccaggacaagaattttgcctttttggagttccgctcagtggacgagactacccaggctatggcctttgatggcatcatcttccagggccagtcactaaagatccgcaggcctcacgactaccagccgcttcctggcatgtcagagaacccctccgtctatgtgcctggggttgtgtccactgtggtccccgactctgcccacaagctgttcatcgggggcttacccaactacctgaacgatgaccaggtcaaagagctgctgacatcctttgggcccctcaaggccttcaacctggtcaaggacagtgccacggggctctccaagggctacgccttctgtgagtacgtggacatcaacgtcacggatcaggccattgcggggctgaacggcatgcagctgggggataagaagctgctggtccagagggcgagtgtgggagccaagaatgccacgctggtgagccccccgagcaccatcaatcagacgcctgtgaccctgcaagtgccgggcttgatgagctcccaggtgcagatgggcggccacccgactgaggtcctgtgcctcatgaacatggtgctgcctgaggagctgctggacgacgaggagtatgaggagatcgtggaggacgtgcgggacgagtgcagcaagtacgggcttgtcaagtccatcgagatcccccggcctgtggacggcgtcgaggtgcccggctgcggaaagatctttgtggagttcacctctgtgtttgactgccagaaagccatgcagggcctgacgggccgcaagttcgccaacagagtggttgtcacaaaatactgtgaccccgactcttatcaccgccgggacttctggaaacggacagccgacggaagcgagttcgagtcaccaaagaagaagcggaaagtc

SEQ ID NO: 588 - DNA, 5661 bp, synthetic construct
  source 1..5661: mol_type = other DNA
atgaaacggacagccgacggaagcgagttcgagtcaccaaagaagaagcggaaagtcatggcgatgcaagcggccaagagggcgaacattcgacttccacctgaagtaaatcggatattgtatataagaaatttgccatacaaaatcacagctgaagaaatgtatgatatatttgggaaatatggacctattcgtcaaatcagagtggggaacacacctgaaactagaggaacagcttatgtggtctatgaggacatctttgatgccaagaatgcatgtgatcacctatcgggattcaatgtttgtaacagataccttgtggttttgtactataatgccaacagggcatttcagaagatggacacaaagaagaaggaggaacagttgaagcttctcaaggagaaatatggcatcaacacagatccaccaaaaacgactactatgaagatttcaattgaattcctcgagccgtttcggatgaccaaatggcaggaaagcactaggcgaaacaagaacaacaaggaatttgttcgcggccaagcttttgcaagatggcatagaaataagaaggataacacaaaagggcggccttacataactgggacattgctgcggtccgcagtaattagaagcgcggaaaacctgctgacattgagtgatgggaaaattagcgaaaagacatgttgtcctgggaaatttgatacggaagataaagacaggttgctgcaattgaggcagcggtccacccttcgttggaccgataagaacccctgtccagataacgctgaaacttactgcccgttttgcgaacttctcgggagatccggtaacgatggaaagaaggctgagaagaaggattggcgctttcgtattcattttggcaatctttcccttccagggaagcccgatttcgacgggccaaaagctataggcagccaacgggtacttaacagggtcgatttcaaatccggtaaggcccatgacttctttaaggcttacgaagtcgaccatactaggtttccccgcttcgaaggggagattaccatagataataaagtcagcgctgaagccaggaaactgctctgtgattctctcaagtttacggatcggctgtgtggagctctgtgcgtaatcaggttcgatgaatatacaccagcagccgatagtgggaaacaaaccgaaaatgtccaagcagaaccgaatgctaatctcgctgaaaagaccgcagagcaaattattagcattctggacgataataagaaaaccgaatatacccgcctgcttgctgatgctattcgttcactccgccgctctagtaaacttgtcgctggcttgccaaaggatcatgacgggaaggatgaccattacctctgggatatcggcaagaagaagaaagacgaaaactctgtcactattaggcaaatccttacgacctcagcagacaccaaggaactcaagaatgccggaaaatggagagaattctgcgagaagctgggtgaagcgctgtacctcaagagtaaagacatgagtggcggcctgaaaattactcggagaatactgggcgatgctgaattccatggaaagcccgatcggcttgaaaagagccggtctgtgtcaatcggatctgtgttgaaagaaactgtggtatgcggcgaactggtcgctaaaacgcccttcttcttcggagcgatagacgaagatgcaaaacaaaccgacctgcaagtactcctcactcccgataacaagtatagactgccaagaagcgccgtgcgaggtatactccgtcgagatcttcaaacctattttgatagcccatgcaatgctgagttgggtggacggccatgcatgtgtaagacgtgtaggattatgagagggatcacggtgatggatgcgcgcagtgagtacaatgccccgccagaaataaggcatcgtacccgcattaatcccttcacaggcacggttgcggaaggtgccctgtttaatatggaagtagcccccgaggggattgtctttccatttcaactccggtaccggggctctgaagatgggctgcccgatgcactgaaaacggtgttgaaatggtgggctgaggggcaggcattcatgagtggcgctgcctcaaccgggaagggccgattccggatggaaaatgctaaatatgaaacgctggatctgagcgacgagaatcaaaggaatgactatcttaagaattggggatggcgtgacgagaaggggctcgaggaactgaagaaacgactgaactcaggtctgccagagcccggtaattatagggatccaaaatggcacgagattaacgtttccattgagatggcaagcccttttattaatggcgacccaatccgcgcagccgtggacaaacgtggtacagatgtggttaccttcgttaagtataaagctgaaggggaagaggcgaaacccgtatgtgcatacaaggccgaatcttttagaggggtgatcagaagtgccgtggcacgcattcatatggaagatggcgtccctttgactgagttgactcacagtgactgtgaatgtctcctgtgccaaatctttggaagtgagtatgaagccggcaaaataaggtttgaagatctcgtattcgaaagtgacccggaacctgtgaccttcgatcatgtggccatcgatagattcactggcggtgcagctgataagaagaaattcgatgattcccctctgcccggtagccctgcaagaccgctcatgttgaaaggctccttctggatccgcagggacgttctcgaggacgaagagtactgtaaggcactcggtaaggctcttgcagatgtgaataatggcctttatcccctcggtggaaagagcgccatcggctacggacaggtcaagagtctgggtataaagggagatgataagaggatttctcgcctcatgaatcctgcctttgatgagacagatgtagccgttccagaaaagcccaaaactgatgccgaggttcgcatcgaggcagagaaagtatattacccacactatttcgtcgaaccccataagaaggtggaacgcgaggagaaaccctgtggtcatcaaaagttccacgaggggcgactgacaggtaaaattcggtgtaagctcattaccaagacacccctcatcgtcccagatactagtaatgacgatttcttcagacctgcggataaagaagctcggaaggaaaaggacgaatatcataaatcatatgctttcttcagacttcataaacaaatcatgattcccgggagcgaattgagaggaatggtgagtagtgtctacgaaactgtgacaaattcttgcttcaggatatttgatgagactaaacggttgtcatggcggatggatgctgatcaccagaatgtgctgcaagactttctcccaggtcgagtgaccgccgatgggaaacatatacaaaagttttccgaaactgcaagggtgcctttctatgacaaaacgcagaaacattttgacattcttgatgagcaagaaattgctggtgagaaacctgttcggatgtgggtcaagcgttttattaaacgactgagcctcgttgatcctgctaaacacccccagaagaaacaagacaataaatggaaaagacgcaaagaaggcatcgccacatttatagagcaaaagaatggctcttattattttaacgtggtcaccaataatggctgcacttctttccacttgtggcataaacctgacaattttgaccaggagaaactcgaaggcatacagaatggtgagaaactggattgctgggtaagagatagtagataccaaaaggcctttcaagagatacccgagaacgacccagacggatgggagtgtaaagagggctaccttcatgtcgtcggccccagcaaagtagagtttagtgacaagaaaggggatgtgatcaataactttcaaggaacactcccatcagttcccaacgactggaaaacaattaggacgaacgattttaagaataggaaaaggaagaatgaacctgtgttttgttgtgaggatgataagggcaattactataccatggctaaatattgcgaaaccttcttcttcgatctgaaggagaacgaggaatacgagatccccgagaaagcaagaatcaaatacaaagaactgctcagggtctataacaacaatcctcaagcagtgccggagagcgtatttcagtctagagttgcccgggaaaacgtggaaaagctgaagtccggagatcttgtgtatttcaaacataatgaaaagtacgtagaggacatcgtcccagtgcggatttcccgaactgtagacgataggatgatcggcaaacgtatgagcgccgatctgcggccgtgccatggagattgggtggaagatggtgatctcagtgccttgaatgcatatcccgagaaaagactcctcttgcgccaccccaaaggactctgccctgcttgccggctctttggaaccggatcttacaagggcagagtcaggtttggattcgcgtcactcgaaaacgatccggagtggctgatcccaggcaagaatcccggcgatccgtttcacggcgggccggtgatgctctcattgttggaacggcctcgcccgacttggagtataccgggatccgacaataagtttaaagtgcctggcagaaagttttacgtccaccaccacgcctggaaaaccattaaggacgggaaccatcccacaacaggcaaagctattgaacaaagccctaataaccgcactgtagaagctctcgccggcgggaattcctttagcttcgaaattgcctttgagaacctgaaagaatgggagctgggtttgctcatccacagcctgcaactcgaaaagggtctggcgcataaacttggaatggcaaagtctatgggatttggttcagttgaaattgacgtcgaatcagtgcgcctgagaaaagattggaagcaatggcggaatggcaattccgaaattcccaactggttgggaaaaggatttgctaaactgaaggaatggttccgggacgagctcgattttatagaaaatcttaagaaacttctttggtttcctgagggcgaccaagcaccccgggtttgctaccccatgctgcgaaagaaggacgatcctaatgggaatagcggttacgaagaactcaaagacggggaattcaagaaagaagatcggcagaagaagctgaccacgccgtggacaccgtgggcaatggcgatgcaagcggccaagagggcgaacattcgacttccacctgaagtaaatcggatattgtatataagaaatttgccatacaaaatcacagctgaagaaatgtatgatatatttgggaaatatggacctattcgtcaaatcagagtggggaacacacctgaaactagaggaacagcttatgtggtctatgaggacatctttgatgccaagaatgcatgtgatcacctatcgggattcaatgtttgtaacagataccttgtggttttgtactataatgccaacagggcatttcagaagatggacacaaagaagaaggaggaacagttgaagcttctcaaggagaaatatggcatcaacacagatccaccaaaaaaacggacagccgacggaagcgagttcgagtcaccaaagaagaagcggaaagtc

SEQ ID NO: 589 - DNA, 6351 bp, synthetic construct
  source 1..6351: mol_type = other DNA
atgaaacggacagccgacggaagcgagttcgagtcaccaaagaagaagcggaaagtcatggcggagtatctggcctccatcttcggcaccgagaaagacaaagtcaactgttcattttatttcaaaattggagcatgtcgtcatggagacaggtgctctcggttgcacaataaaccgacgtttagccagaccattgccctcttgaacatttaccgtaaccctcaaaactcttcccagtctgctgacggtttgcgctgtgccgtgagcgatgtggagatgcaggaacactatgatgagttttttgaggaggtttttacagaaatggaggagaagtatggggaagtagaggagatgaacgtctgtgacaacctgggagaccacctggtggggaacgtgtacgtcaagtttcgccgtgaggaagatgcggaaaaggctgtgattgacttgaataaccgttggtttaatggacagccgatccacgccgagctgtcacccgtgacggacttcagagaagcctgctgccgtcagtatgagatgggagaatgcacacgaggcggcttctgcaacttcatgcatttgaagcccatttccagagagctgcggcgggagctgtatggccgccgtcgcaagaagcatagatcaagatcccgatcccgggagcgtcgttctcggtctagagaccgtggtcgtggcggtggcggtggcggtggtggaggtggcggcggacgggagcgtgacaggaggcggtcgagagatcgtgaaagatctgggcgattcacgactactatgaagatttcaattgaattcctcgagccgtttcggatgaccaaatggcaggaaagcactaggcgaaacaagaacaacaaggaatttgttcgcggccaagcttttgcaagatggcatagaaataagaaggataacacaaaagggcggccttacataactgggacattgctgcggtccgcagtaattagaagcgcggaaaacctgctgacattgagtgatgggaaaattagcgaaaagacatgttgtcctgggaaatttgatacggaagataaagacaggttgctgcaattgaggcagcggtccacccttcgttggaccgataagaacccctgtccagataacgctgaaacttactgcccgttttgcgaacttctcgggagatccggtaacgatggaaagaaggctgagaagaaggattggcgctttcgtattcattttggcaatctttcccttccagggaagcccgatttcgacgggccaaaagctataggcagccaacgggtacttaacagggtcgatttcaaatccggtaaggcccatgacttctttaaggcttacgaagtcgaccatactaggtttccccgcttcgaaggggagattaccatagataataaagtcagcgctgaagccaggaaactgctctgtgattctctcaagtttacggatcggctgtgtggagctctgtgcgtaatcaggttcgatgaatatacaccagcagccgatagtgggaaacaaaccgaaaatgtccaagcagaaccgaatgctaatctcgctgaaaagaccgcagagcaaattattagcattctggacgataataagaaaaccgaatatacccgcctgcttgctgatgctattcgttcactccgccgctctagtaaacttgtcgctggcttgccaaaggatcatgacgggaaggatgaccattacctctgggatatcggcaagaagaagaaagacgaaaactctgtcactattaggcaaatccttacgacctcagcagacaccaaggaactcaagaatgccggaaaatggagagaattctgcgagaagctgggtgaagcgctgtacctcaagagtaaagacatgagtggcggcctgaaaattactcggagaatactgggcgatgctgaattccatggaaagcccgatcggcttgaaaagagccggtctgtgtcaatcggatctgtgttgaaagaaactgtggtatgcggcgaactggtcgctaaaacgcccttcttcttcggagcgatagacgaagatgcaaaacaaaccgacctgcaagtactcctcactcccgataacaagtatagactgccaagaagcgccgtgcgaggtatactccgtcgagatcttcaaacctattttgatagcccatgcaatgctgagttgggtggacggccatgcatgtgtaagacgtgtaggattatgagagggatcacggtgatggatgcgcgcagtgagtacaatgccccgccagaaataaggcatcgtacccgcattaatcccttcacaggcacggttgcggaaggtgccctgtttaatatggaagtagcccccgaggggattgtctttccatttcaactccggtaccggggctctgaagatgggctgcccgatgcactgaaaacggtgttgaaatggtgggctgaggggcaggcattcatgagtggcgctgcctcaaccgggaagggccgattccggatggaaaatgctaaatatgaaacgctggatctgagcgacgagaatcaaaggaatgactatcttaagaattggggatggcgtgacgagaaggggctcgaggaactgaagaaacgactgaactcaggtctgccagagcccggtaattatagggatccaaaatggcacgagattaacgtttccattgagatggcaagcccttttattaatggcgacccaatccgcgcagccgtggacaaacgtggtacagatgtggttaccttcgttaagtataaagctgaaggggaagaggcgaaacccgtatgtgcatacaaggccgaatcttttagaggggtgatcagaagtgccgtggcacgcattcatatggaagatggcgtccctttgactgagttgactcacagtgactgtgaatgtctcctgtgccaaatctttggaagtgagtatgaagccggcaaaataaggtttgaagatctcgtattcgaaagtgacccggaacctgtgaccttcgatcatgtggccatcgatagattcactggcggtgcagctgataagaagaaattcgatgattcccctctgcccggtagccctgcaagaccgctcatgttgaaaggctccttctggatccgcagggacgttctcgaggacgaagagtactgtaaggcactcggtaaggctcttgcagatgtgaataatggcctttatcccctcggtggaaagagcgccatcggctacggacaggtcaagagtctgggtataaagggagatgataagaggatttctcgcctcatgaatcctgcctttgatgagacagatgtagccgttccagaaaagcccaaaactgatgccgaggttcgcatcgaggcagagaaagtatattacccacactatttcgtcgaaccccataagaaggtggaacgcgaggagaaaccctgtggtcatcaaaagttccacgaggggcgactgacaggtaaaattcggtgtaagctcattaccaagacacccctcatcgtcccagatactagtaatgacgatttcttcagacctgcggataaagaagctcggaaggaaaaggacgaatatcataaatcatatgctttcttcagacttcataaacaaatcatgattcccgggagcgaattgagaggaatggtgagtagtgtctacgaaactgtgacaaattcttgcttcaggatatttgatgagactaaacggttgtcatggcggatggatgctgatcaccagaatgtgctgcaagactttctcccaggtcgagtgaccgccgatgggaaacatatacaaaagttttccgaaactgcaagggtgcctttctatgacaaaacgcagaaacattttgacattcttgatgagcaagaaattgctggtgagaaacctgttcggatgtgggtcaagcgttttattaaacgactgagcctcgttgatcctgctaaacacccccagaagaaacaagacaataaatggaaaagacgcaaagaaggcatcgccacatttatagagcaaaagaatggctcttattattttaacgtggtcaccaataatggctgcacttctttccacttgtggcataaacctgacaattttgaccaggagaaactcgaaggcatacagaatggtgagaaactggattgctgggtaagagatagtagataccaaaaggcctttcaagagatacccgagaacgacccagacggatgggagtgtaaagagggctaccttcatgtcgtcggccccagcaaagtagagtttagtgacaagaaaggggatgtgatcaataactttcaaggaacactcccatcagttcccaacgactggaaaacaattaggacgaacgattttaagaataggaaaaggaagaatgaacctgtgttttgttgtgaggatgataagggcaattactataccatggctaaatattgcgaaaccttcttcttcgatctgaaggagaacgaggaatacgagatccccgagaaagcaagaatcaaatacaaagaactgctcagggtctataacaacaatcctcaagcagtgccggagagcgtatttcagtctagagttgcccgggaaaacgtggaaaagctgaagtccggagatcttgtgtatttcaaacataatgaaaagtacgtagaggacatcgtcccagtgcggatttcccgaactgtagacgataggatgatcggcaaacgtatgagcgccgatctgcggccgtgccatggagattgggtggaagatggtgatctcagtgccttgaatgcatatcccgagaaaagactcctcttgcgccaccccaaaggactctgccctgcttgccggctctttggaaccggatcttacaagggcagagtcaggtttggattcgcgtcactcgaaaacgatccggagtggctgatcccaggcaagaatcccggcgatccgtttcacggcgggccggtgatgctctcattgttggaacggcctcgcccgacttggagtataccgggatccgacaataagtttaaagtgcctggcagaaagttttacgtccaccaccacgcctggaaaaccattaaggacgggaaccatcccacaacaggcaaagctattgaacaaagccctaataaccgcactgtagaagctctcgccggcgggaattcctttagcttcgaaattgcctttgagaacctgaaagaatgggagctgggtttgctcatccacagcctgcaactcgaaaagggtctggcgcataaacttggaatggcaaagtctatgggatttggttcagttgaaattgacgtcgaatcagtgcgcctgagaaaagattggaagcaatggcggaatggcaattccgaaattcccaactggttgggaaaaggatttgctaaactgaaggaatggttccgggacgagctcgattttatagaaaatcttaagaaacttctttggtttcctgagggcgaccaagcaccccgggtttgctaccccatgctgcgaaagaaggacgatcctaatgggaatagcggttacgaagaactcaaagacggggaattcaagaaagaagatcggcagaagaagctgaccacgccgtggacaccgtgggcaatggcggagtatctggcctccatcttcggcaccgagaaagacaaagtcaactgttcattttatttcaaaattggagcatgtcgtcatggagacaggtgctctcggttgcacaataaaccgacgtttagccagaccattgccctcttgaacatttaccgtaaccctcaaaactcttcccagtctgctgacggtttgcgctgtgccgtgagcgatgtggagatgcaggaacactatgatgagttttttgaggaggtttttacagaaatggaggagaagtatggggaagtagaggagatgaacgtctgtgacaacctgggagaccacctggtggggaacgtgtacgtcaagtttcgccgtgaggaagatgcggaaaaggctgtgattgacttgaataaccgttggtttaatggacagccgatccacgccgagctgtcacccgtgacggacttcagagaagcctgctgccgtcagtatgagatgggagaatgcacacgaggcggcttctgcaacttcatgcatttgaagcccatttccagagagctgcggcgggagctgtatggccgccgtcgcaagaagcatagatcaagatcccgatcccgggagcgtcgttctcggtctagagaccgtggtcgtggcggtggcggtggcggtggtggaggtggcggcggacgggagcgtgacaggaggcggtcgagagatcgtgaaagatctgggcgattcaaacggacagccgacggaagcgagttcgagtcaccaaagaagaagcggaaagtc

SEQ ID NO: 590 - DNA, 6834 bp, synthetic construct
  source 1..6834: mol_type = other DNA
atgaaacggacagccgacggaagcgagttcgagtcaccaaagaagaagcggaaagtcatgtccctgtacgatgacctaggagtggagaccagtgactcaaaaacagaaggctggtccaaaaacttcaaacttctgcagtctcagcttcaggtgaagaaggcagctctcactcaggcaaagagccaaaggacgaaacaaagtacagtcctcgccccagtcattgacctgaagcgaggtggctcctcagatgaccggcaaattgtggacactccaccgcatgtagcagctgggctgaaggatcctgttcccagtgggttttctgcaggggaagttctgattcccttagctgacgaatatgaccctatgtttcctaatgattatgagaaagtagtgaagcgccaaagagaggaacgacagagacagcgggagctggaaagacaaaaggaaatagaagaaagggaaaaaaggcgtaaagacagacatgaagcaagtgggtttgcaaggagaccagatccagattctgatgaagatgaagattatgagcgagagaggaggaaaagaagtatgggcggagctgccattgccccacccacttctctggtagagaaagacaaagagttaccccgagattttccttatgaagaggactcaagacctcgatcacagtcttccaaagcagccattcctcccccagtgtacgaggaacaagacagaccgagatctccaaccggacctagcaactccttcctcgctaacatggggggcacggtggcgcacaagatcatgcagaagtacggcttccgggagggccagggtctggggaagcatgagcagggcctgagcactgccttgtcagtggagaagaccagcaagcgtggcggcaagatcatcgtgggcgacgccacagagaaagatgcatccaagaagtcagattcaaatccgctgactgaaatacttaagtgtcctactaaagtggtcttactaaggaacatggttggtgcgggagaggtggatgaagacttggaagttgaaaccaaggaagaatgtgaaaaatatggcaaagttggaaaatgtgtgatatttgaaattcctggtgcccctgatgatgaagcagtacggatatttttagaatttgagagagttgaatcagcaattaaagcggttgttgacttgaatgggaggtattttggtggacgggtggtaaaagcatgtttctacaatttggacaaattcagggtcttggatttggcagaacaagttacgactactatgaagatttcaattgaattcctcgagccgtttcggatgaccaaatggcaggaaagcactaggcgaaacaagaacaacaaggaatttgttcgcggccaagcttttgcaagatggcatagaaataagaaggataacacaaaagggcggccttacataactgggacattgctgcggtccgcagtaattagaagcgcggaaaacctgctgacattgagtgatgggaaaattagcgaaaagacatgttgtcctgggaaatttgatacggaagataaagacaggttgctgcaattgaggcagcggtccacccttcgttggaccgataagaacccctgtccagataacgctgaaacttactgcccgttttgcgaacttctcgggagatccggtaacgatggaaagaaggctgagaagaaggattggcgctttcgtattcattttggcaatctttcccttccagggaagcccgatttcgacgggccaaaagctataggcagccaacgggtacttaacagggtcgatttcaaatccggtaaggcccatgacttctttaaggcttacgaagtcgaccatactaggtttccccgcttcgaaggggagattaccatagataataaagtcagcgctgaagccaggaaactgctctgtgattctctcaagtttacggatcggctgtgtggagctctgtgcgtaatcaggttcgatgaatatacaccagcagccgatagtgggaaacaaaccgaaaatgtccaagcagaaccgaatgctaatctcgctgaaaagaccgcagagcaaattattagcattctggacgataataagaaaaccgaatatacccgcctgcttgctgatgctattcgttcactccgccgctctagtaaacttgtcgctggcttgccaaaggatcatgacgggaaggatgaccattacctctgggatatcggcaagaagaagaaagacgaaaactctgtcactattaggcaaatccttacgacctcagcagacaccaaggaactcaagaatgccggaaaatggagagaattctgcgagaagctgggtgaagcgctgtacctcaagagtaaagacatgagtggcggcctgaaaattactcggagaatactgggcgatgctgaattccatggaaagcccgatcggcttgaaaagagccggtctgtgtcaatcggatctgtgttgaaagaaactgtggtatgcggcgaactggtcgctaaaacgcccttcttcttcggagcgatagacgaagatgcaaaacaaaccgacctgcaagtactcctcactcccgataacaagtatagactgccaagaagcgccgtgcgaggtatactccgtcgagatcttcaaacctattttgatagcccatgcaatgctgagttgggtggacggccatgcatgtgtaagacgtgtaggattatgagagggatcacggtgatggatgcgcgcagtgagtacaatgccccgccagaaataaggcatcgtacccgcattaatcccttcacaggcacggttgcggaaggtgccctgtttaatatggaagtagcccccgaggggattgtctttccatttcaactccggtaccggggctctgaagatgggctgcccgatgcactgaaaacggtgttgaaatggtgggctgaggggcaggcattcatgagtggcgctgcctcaaccgggaagggccgattccggatggaaaatgctaaatatgaaacgctggatctgagcgacgagaatcaaaggaatgactatcttaagaattggggatggcgtgacgagaaggggctcgaggaactgaagaaacgactgaactcaggtctgccagagcccggtaattatagggatccaaaatggcacgagattaacgtttccattgagatggcaagcccttttattaatggcgacccaatccgcgcagccgtggacaaacgtggtacagatgtggttaccttcgttaagtataaagctgaaggggaagaggcgaaacccgtatgtgcatacaaggccgaatcttttagaggggtgatcagaagtgccgtggcacgcattcatatggaagatggcgtccctttgactgagttgactcacagtgactgtgaatgtctcctgtgccaaatctttggaagtgagtatgaagccggcaaaataaggtttgaagatctcgtattcgaaagtgacccggaacctgtgaccttcgatcatgtggccatcgatagattcactggcggtgcagctgataagaagaaattcgatgattcccctctgcccggtagccctgcaagaccgctcatgttgaaaggctccttctggatccgcagggacgttctcgaggacgaagagtactgtaaggcactcggtaaggctcttgcagatgtgaataatggcctttatcccctcggtggaaagagcgccatcggctacggacaggtcaagagtctgggtataaagggagatgataagaggatttctcgcctcatgaatcctgcctttgatgagacagatgtagccgttccagaaaagcccaaaactgatgccgaggttcgcatcgaggcagagaaagtatattacccacactatttcgtcgaaccccataagaaggtggaacgcgaggagaaaccctgtggtcatcaaaagttccacgaggggcgactgacaggtaaaattcggtgtaagctcattaccaagacacccctcatcgtcccagatactagtaatgacgatttcttcagacctgcggataaagaagctcggaaggaaaaggacgaatatcataaatcatatgctttcttcagacttcataaacaaatcatgattcccgggagcgaattgagaggaatggtgagtagtgtctacgaaactgtgacaaattcttgcttcaggatatttgatgagactaaacggttgtcatggcggatggatgctgatcaccagaatgtgctgcaagactttctcccaggtcgagtgaccgccgatgggaaacatatacaaaagttttccgaaactgcaagggtgcctttctatgacaaaacgcagaaacattttgacattcttgatgagcaagaaattgctggtgagaaacctgttcggatgtgggtcaagcgttttattaaacgactgagcctcgttgatcctgctaaacacccccagaagaaacaagacaataaatggaaaagacgcaaagaaggcatcgccacatttatagagcaaaagaatggctcttattattttaacgtggtcaccaataatggctgcacttctttccacttgtggcataaacctgacaattttgaccaggagaaactcgaaggcatacagaatggtgagaaactggattgctgggtaagagatagtagataccaaaaggcctttcaagagatacccgagaacgacccagacggatgggagtgtaaagagggctaccttcatgtcgtcggccccagcaaagtagagtttagtgacaagaaaggggatgtgatcaataactttcaaggaacactcccatcagttcccaacgactggaaaacaattaggacgaacgattttaagaataggaaaaggaagaatgaacctgtgttttgttgtgaggatgataagggcaattactataccatggctaaatattgcgaaaccttcttcttcgatctgaaggagaacgaggaatacgagatccccgagaaagcaagaatcaaatacaaagaactgctcagggtctataacaacaatcctcaagcagtgccggagagcgtatttcagtctagagttgcccgggaaaacgtggaaaagctgaagtccggagatcttgtgtatttcaaacataatgaaaagtacgtagaggacatcgtcccagtgcggatttcccgaactgtagacgataggatgatcggcaaacgtatgagcgccgatctgcggccgtgccatggagattgggtggaagatggtgatctcagtgccttgaatgcatatcccgagaaaagactcctcttgcgccaccccaaaggactctgccctgcttgccggctctttggaaccggatcttacaagggcagagtcaggtttggattcgcgtcactcgaaaacgatccggagtggctgatcccaggcaagaatcccggcgatccgtttcacggcgggccggtgatgctctcattgttggaacggcctcgcccgacttggagtataccgggatccgacaataagtttaaagtgcctggcagaaagttttacgtccaccaccacgcctggaaaaccattaaggacgggaaccatcccacaacaggcaaagctattgaacaaagccctaataaccgcactgtagaagctctcgccggcgggaattcctttagcttcgaaattgcctttgagaacctgaaagaatgggagctgggtttgctcatccacagcctgcaactcgaaaagggtctggcgcataaacttggaatggcaaagtctatgggatttggttcagttgaaattgacgtcgaatcagtgcgcctgagaaaagattggaagcaatggcggaatggcaattccgaaattcccaactggttgggaaaaggatttgctaaactgaaggaatggttccgggacgagctcgattttatagaaaatcttaagaaacttctttggtttcctgagggcgaccaagcaccccgggtttgctaccccatgctgcgaaagaaggacgatcctaatgggaatagcggttacgaagaactcaaagacggggaattcaagaaagaagatcggcagaagaagctgaccacgccgtggacaccgtgggcaatggcggagtatctggcctccatcttcggcaccgagaaagacaaagtcaactgttcattttatttcaaaattggagcatgtcgtcatggagacaggtgctctcggttgcacaataaaccgacgtttagccagaccattgccctcttgaacatttaccgtaaccctcaaaactcttcccagtctgctgacggtttgcgctgtgccgtgagcgatgtggagatgcaggaacactatgatgagttttttgaggaggtttttacagaaatggaggagaagtatggggaagtagaggagatgaacgtctgtgacaacctgggagaccacctggtggggaacgtgtacgtcaagtttcgccgtgaggaagatgcggaaaaggctgtgattgacttgaataaccgttggtttaatggacagccgctccacgccgagctgtcacccgtgacggacttcagagaagcctgctgccgtcagtatgagatgggagaatgcacacgaggcggcttctgcaacttcatgcatttgaagcccatttccagagagctgcggcgggagctgtatggccgccgtcgcaagaagcatagatcaagatcccgatcccgggagcgtcgttctcggtctagagaccgtggtcgtggcggtggcggtggcggtggtggaggtggcggcggacgggagcgtgacaggaggcggtcgagagatcgtgaaagatctgggcgattcaaacggacagccgacggaagcgagttcgagtcaccaaagaagaagcggaaagtc

SEQ ID NO: 591 - DNA, 6006 bp, synthetic construct
  source 1..6006: mol_type = other DNA
atgaaacggacagccgacggaagcgagttcgagtcaccaaagaagaagcggaaagtcatggcgatgcaagcggccaagagggcgaacattcgacttccacctgaagtaaatcggatattgtatataagaaatttgccatacaaaatcacagctgaagaaatgtatgatatatttgggaaatatggacctattcgtcaaatcagagtggggaacacacctgaaactagaggaacagcttatgtggtctatgaggacatctttgatgccaagaatgcatgtgatcacctatcgggattcaatgtttgtaacagataccttgtggttttgtactataatgccaacagggcatttcagaagatggacacaaagaagaaggaggaacagttgaagcttctcaaggagaaatatggcatcaacacagatccaccaaaaacgactactatgaagatttcaattgaattcctcgagccgtttcggatgaccaaatggcaggaaagcactaggcgaaacaagaacaacaaggaatttgttcgcggccaagcttttgcaagatggcatagaaataagaaggataacacaaaagggcggccttacataactgggacattgctgcggtccgcagtaattagaagcgcggaaaacctgctgacattgagtgatgggaaaattagcgaaaagacatgttgtcctgggaaatttgatacggaagataaagacaggttgctgcaattgaggcagcggtccacccttcgttggaccgataagaacccctgtccagataacgctgaaacttactgcccgttttgcgaacttctcgggagatccggtaacgatggaaagaaggctgagaagaaggattggcgctttcgtattcattttggcaatctttcccttccagggaagcccgatttcgacgggccaaaagctataggcagccaacgggtacttaacagggtcgatttcaaatccggtaaggcccatgacttctttaaggcttacgaagtcgaccatactaggtttccccgcttcgaaggggagattaccatagataataaagtcagcgctgaagccaggaaactgctctgtgattctctcaagtttacggatcggctgtgtggagctctgtgcgtaatcaggttcgatgaatatacaccagcagccgatagtgggaaacaaaccgaaaatgtccaagcagaaccgaatgctaatctcgctgaaaagaccgcagagcaaattattagcattctggacgataataagaaaaccgaatatacccgcctgcttgctgatgctattcgttcactccgccgctctagtaaacttgtcgctggcttgccaaaggatcatgacgggaaggatgaccattacctctgggatatcggcaagaagaagaaagacgaaaactctgtcactattaggcaaatccttacgacctcagcagacaccaaggaactcaagaatgccggaaaatggagagaattctgcgagaagctgggtgaagcgctgtacctcaagagtaaagacatgagtggcggcctgaaaattactcggagaatactgggcgatgctgaattccatggaaagcccgatcggcttgaaaagagccggtctgtgtcaatcggatctgtgttgaaagaaactgtggtatgcggcgaactggtcgctaaaacgcccttcttcttcggagcgatagacgaagatgcaaaacaaaccgacctgcaagtactcctcactcccgataacaagtatagactgccaagaagcgccgtgcgaggtatactccgtcgagatcttcaaacctattttgatagcccatgcaatgctgagttgggtggacggccatgcatgtgtaagacgtgtaggattatgagagggatcacggtgatggatgcgcgcagtgagtacaatgccccgccagaaataaggcatcgtacccgcattaatcccttcacaggcacggttgcggaaggtgccctgtttaatatggaagtagcccccgaggggattgtctttccatttcaactccggtaccggggctctgaagatgggctgcccgatgcactgaaaacggtgttgaaatggtgggctgaggggcaggcattcatgagtggcgctgcctcaaccgggaagggccgattccggatggaaaatgctaaatatgaaacgctggatctgagcgacgagaatcaaaggaatgactatcttaagaattggggatggcgtgacgagaaggggctcgaggaactgaagaaacgactgaactcaggtctgccagagcccggtaattatagggatccaaaatggcacgagattaacgtttccattgagatggcaagcccttttattaatggcgacccaatccgcgcagccgtggacaaacgtggtacagatgtggttaccttcgttaagtataaagctgaaggggaagaggcgaaacccgtatgtgcatacaaggccgaatcttttagaggggtgatcagaagtgccgtggcacgcattcatatggaagatggcgtccctttgactgagttgactcacagtgactgtgaatgtctcctgtgccaaatctttggaagtgagtatgaagccggcaaaataaggtttgaagatctcgtattcgaaagtgacccggaacctgtgaccttcgatcatgtggccatcgatagattcactggcggtgcagctgataagaagaaattcgatgattcccctctgcccggtagccctgcaagaccgctcatgttgaaaggctccttctggatccgcagggacgttctcgaggacgaagagtactgtaaggcactcggtaaggctcttgcagatgtgaataatggcctttatcccctcggtggaaagagcgccatcggctacggacaggtcaagagtctgggtataaagggagatgataagaggatttctcgcctcatgaatcctgcctttgatgagacagatgtagccgttccagaaaagcccaaaactgatgccgaggttcgcatcgaggcagagaaagtatattacccacactatttcgtcgaaccccataagaaggtggaacgcgaggagaaaccctgtggtcatcaaaagttccacgaggggcgactgacaggtaaaattcggtgtaagctcattaccaagacacccctcatcgtcccagatactagtaatgacgatttcttcagacctgcggataaagaagctcggaaggaaaaggacgaatatcataaatcatatgctttcttcagacttcataaacaaatcatgattcccgggagcgaattgagaggaatggtgagtagtgtctacgaaactgtgacaaattcttgcttcaggatatttgatgagactaaacggttgtcatggcggatggatgctgatcaccagaatgtgctgcaagactttctcccaggtcgagtgaccgccgatgggaaacatatacaaaagttttccgaaactgcaagggtgcctttctatgacaaaacgcagaaacattttgacattcttgatgagcaagaaattgctggtgagaaacctgttcggatgtgggtcaagcgttttattaaacgactgagcctcgttgatcctgctaaacacccccagaagaaacaagacaataaatggaaaagacgcaaagaaggcatcgccacatttatagagcaaaagaatggctcttattattttaacgtggtcaccaataatggctgcacttctttccacttgtggcataaacctgacaattttgaccaggagaaactcgaaggcatacagaatggtgagaaactggattgctgggtaagagatagtagataccaaaaggcctttcaagagatacccgagaacgacccagacggatgggagtgtaaagagggctaccttcatgtcgtcggccccagcaaagtagagtttagtgacaagaaaggggatgtgatcaataactttcaaggaacactcccatcagttcccaacgactggaaaacaattaggacgaacgattttaagaataggaaaaggaagaatgaacctgtgttttgttgtgaggatgataagggcaattactataccatggctaaatattgcgaaaccttcttcttcgatctgaaggagaacgaggaatacgagatccccgagaaagcaagaatcaaatacaaagaactgctcagggtctataacaacaatcctcaagcagtgccggagagcgtatttcagtctagagttgcccgggaaaacgtggaaaagctgaagtccggagatcttgtgtatttcaaacataatgaaaagtacgtagaggacatcgtcccagtgcggatttcccgaactgtagacgataggatgatcggcaaacgtatgagcgccgatctgcggccgtgccatggagattgggtggaagatggtgatctcagtgccttgaatgcatatcccgagaaaagactcctcttgcgccaccccaaaggactctgccctgcttgccggctctttggaaccggatcttacaagggcagagtcaggtttggattcgcgtcactcgaaaacgatccggagtggctgatcccaggcaagaatcccggcgatccgtttcacggcgggccggtgatgctctcattgttggaacggcctcgcccgacttggagtataccgggatccgacaataagtttaaagtgcctggcagaaagttttacgtccaccaccacgcctggaaaaccattaaggacgggaaccatcccacaacaggcaaagctattgaacaaagccctaataaccgcactgtagaagctctcgccggcgggaattcctttagcttcgaaattgcctttgagaacctgaaagaatgggagctgggtttgctcatccacagcctgcaactcgaaaagggtctggcgcataaacttggaatggcaaagtctatgggatttggttcagttgaaattgacgtcgaatcagtgcgcctgagaaaagattggaagcaatggcggaatggcaattccgaaattcccaactggttgggaaaaggatttgctaaactgaaggaatggttccgggacgagctcgattttatagaaaatcttaagaaacttctttggtttcctgagggcgaccaagcaccccgggtttgctaccccatgctgcgaaagaaggacgatcctaatgggaatagcggttacgaagaactcaaagacggggaattcaagaaagaagatcggcagaagaagctgaccacgccgtggacaccgtgggcaatggcggagtatctggcctccatcttcggcaccgagaaagacaaagtcaactgttcattttatttcaaaattggagcatgtcgtcatggagacaggtgctctcggttgcacaataaaccgacgtttagccagaccattgccctcttgaacatttaccgtaaccctcaaaactcttcccagtctgctgacggtttgcgctgtgccgtgagcgatgtggagatgcaggaacactatgatgagttttttgaggaggtttttacagaaatggaggagaagtatggggaagtagaggagatgaacgtctgtgacaacctgggagaccacctggtggggaacgtgtacgtcaagtttcgccgtgaggaagatgcggaaaaggctgtgattgacttgaataaccgttggtttaatggacagccgctccacgccgagctgtcacccgtgacggacttcagagaagcctgctgccgtcagtatgagatgggagaatgcacacgaggcggcttctgcaacttcatgcatttgaagcccatttccagagagctgcggcgggagctgtatggccgccgtcgcaagaagcatagatcaagatcccgatcccgggagcgtcgttctcggtctagagaccgtggtcgtggcggtggcggtggcggtggtggaggtggcggcggacgggagcgtgacaggaggcggtcgagagatcgtgaaagatctgggcgattcaaacggacagccgacggaagcgagttcgagtcaccaaagaagaagcggaaagtc

SEQ ID NO: 592 - DNA, 6006 bp, synthetic construct
  source 1..6006: mol_type = other DNA
atgaaacggacagccgacggaagcgagttcgagtcaccaaagaagaagcggaaagtcatggcggagtatctggcctccatcttcggcaccgagaaagacaaagtcaactgttcattttatttcaaaattggagcatgtcgtcatggagacaggtgctctcggttgcacaataaaccgacgtttagccagaccattgccctcttgaacatttaccgtaaccctcaaaactcttcccagtctgctgacggtttgcgctgtgccgtgagcgatgtggagatgcaggaacactatgatgagttttttgaggaggtttttacagaaatggaggagaagtatggggaagtagaggagatgaacgtctgtgacaacctgggagaccacctggtggggaacgtgtacgtcaagtttcgccgtgaggaagatgcggaaaaggctgtgattgacttgaataaccgttggtttaatggacagccgctccacgccgagctgtcacccgtgacggacttcagagaagcctgctgccgtcagtatgagatgggagaatgcacacgaggcggcttctgcaacttcatgcatttgaagcccatttccagagagctgcggcgggagctgtatggccgccgtcgcaagaagcatagatcaagatcccgatcccgggagcgtcgttctcggtctagagaccgtggtcgtggcggtggcggtggcggtggtggaggtggcggcggacgggagcgtgacaggaggcggtcgagagatcgtgaaagatctgggcgattcacgactactatgaagatttcaattgaattcctcgagccgtttcggatgaccaaatggcaggaaagcactaggcgaaacaagaacaacaaggaatttgttcgcggccaagcttttgcaagatggcatagaaataagaaggataacacaaaagggcggccttacataactgggacattgctgcggtccgcagtaattagaagcgcggaaaacctgctgacattgagtgatgggaaaattagcgaaaagacatgttgtcctgggaaatttgatacggaagataaagacaggttgctgcaattgaggcagcggtccacccttcgttggaccgataagaacccctgtccagataacgctgaaacttactgcccgttttgcgaacttctcgggagatccggtaacgatggaaagaaggctgagaagaaggattggcgctttcgtattcattttggcaatctttcccttccagggaagcccgatttcgacgggccaaaagctataggcagccaacgggtacttaacagggtcgatttcaaatccggtaaggcccatgacttctttaaggcttacgaagtcgaccatactaggtttccccgcttcgaaggggagattaccatagataataaagtcagcgctgaagccaggaaactgctctgtgattctctcaagtttacggatcggctgtgtggagctctgtgcgtaatcaggttcgatgaatatacaccagcagccgatagtgggaaacaaaccgaaaatgtccaagcagaaccgaatgctaatctcgctgaaaagaccgcagagcaaattattagcattctggacgataataagaaaaccgaatatacccgcctgcttgctgatgctattcgttcactccgccgctctagtaaacttgtcgctggcttgccaaaggatcatgacgggaaggatgaccattacctctgggatatcggcaagaagaagaaagacgaaaactctgtcactattaggcaaatccttacgacctcagcagacaccaaggaactcaagaatgccggaaaatggagagaattctgcgagaagctgggtgaagcgctgtacctcaagagtaaagacatgagtggcggcctgaaaattactcggagaatactgggcgatgctgaattccatggaaagcccgatcggcttgaaaagagccggtctgtgtcaatcggatctgtgttgaaagaaactgtggtatgcggcgaactggtcgctaaaacgcccttcttcttcggagcgatagacgaagatgcaaaacaaaccgacctgcaagtactcctcactcccgataacaagtatagactgccaagaagcgccgtgcgaggtatactccgtcgagatcttcaaacctattttgatagcccatgcaatgctgagttgggtggacggccatgcatgtgtaagacgtgtaggattatgagagggatcacggtgatggatgcgcgcagtgagtacaatgccccgccagaaataaggcatcgtacccgcattaatcccttcacaggcacggttgcggaaggtgccctgtttaatatggaagtagcccccgaggggattgtctttccatttcaactccggtaccggggctctgaagatgggctgcccgatgcactgaaaacggtgttgaaatggtgggctgaggggcaggcattcatgagtggcgctgcctcaaccgggaagggccgattccggatggaaaatgctaaatatgaaacgctggatctgagcgacgagaatcaaaggaatgactatcttaagaattggggatggcgtgacgagaaggggctcgaggaactgaagaaacgactgaactcaggtctgccagagcccggtaattatagggatccaaaatggcacgagattaacgtttccattgagatggcaagcccttttattaatggcgacccaatccgcgcagccgtggacaaacgtggtacagatgtggttaccttcgttaagtataaagctgaaggggaagaggcgaaacccgtatgtgcatacaaggccgaatcttttagaggggtgatcagaagtgccgtggcacgcattcatatggaagatggcgtccctttgactgagttgactcacagtgactgtgaatgtctcctgtgccaaatctttggaagtgagtatgaagccggcaaaataaggtttgaagatctcgtattcgaaagtgacccggaacctgtgaccttcgatcatgtggccatcgatagattcactggcggtgcagctgataagaagaaattcgatgattcccctctgcccggtagccctgcaagaccgctcatgttgaaaggctccttctggatccgcagggacgttctcgaggacgaagagtactgtaaggcactcggtaaggctcttgcagatgtgaataatggcctttatcccctcggtggaaagagcgccatcggctacggacaggtcaagagtctgggtataaagggagatgataagaggatttctcgcctcatgaatcctgcctttgatgagacagatgtagccgttccagaaaagcccaaaactgatgccgaggttcgcatcgaggcagagaaagtatattacccacactatttcgtcgaaccccataagaaggtggaacgcgaggagaaaccctgtggtcatcaaaagttccacgaggggcgactgacaggtaaaattcggtgtaagctcattaccaagacacccctcatcgtcccagatactagtaatgacgatttcttcagacctgcggataaagaagctcggaaggaaaaggacgaatatcataaatcatatgctttcttcagacttcataaacaaatcatgattcccgggagcgaattgagaggaatggtgagtagtgtctacgaaactgtgacaaattcttgcttcaggatatttgatgagactaaacggttgtcatggcggatggatgctgatcaccagaatgtgctgcaagactttctcccaggtcgagtgaccgccgatgggaaacatatacaaaagttttccgaaactgcaagggtgcctttctatgacaaaacgcagaaacattttgacattcttgatgagcaagaaattgctggtgagaaacctgttcggatgtgggtcaagcgttttattaaacgactgagcctcgttgatcctgctaaacacccccagaagaaacaagacaataaatggaaaagacgcaaagaaggcatcgccacatttatagagcaaaagaatggctcttattattttaacgtggtcaccaataatggctgcacttctttccacttgtggcataaacctgacaattttgaccaggagaaactcgaaggcatacagaatggtgagaaactggattgctgggtaagagatagtagataccaaaaggcctttcaagagatacccgagaacgacccagacggatgggagtgtaaagagggctaccttcatgtcgtcggccccagcaaagtagagtttagtgacaagaaaggggatgtgatcaataactttcaaggaacactcccatcagttcccaacgactggaaaacaattaggacgaacgattttaagaataggaaaaggaagaatgaacctgtgttttgttgtgaggatgataagggcaattactataccatggctaaatattgcgaaaccttcttcttcgatctgaaggagaacgaggaatacgagatccccgagaaagcaagaatcaaatacaaagaactgctcagggtctataacaacaatcctcaagcagtgccggagagcgtatttcagtctagagttgcccgggaaaacgtggaaaagctgaagtccggagatcttgtgtatttcaaacataatgaaaagtacgtagaggacatcgtcccagtgcggatttcccgaactgtagacgataggatgatcggcaaacgtatgagcgccgatctgcggccgtgccatggagattgggtggaagatggtgatctcagtgccttgaatgcatatcccgagaaaagactcctcttgcgccaccccaaaggactctgccctgcttgccggctctttggaaccggatcttacaagggcagagtcaggtttggattcgcgtcactcgaaaacgatccggagtggctgatcccaggcaagaatcccggcgatccgtttcacggcgggccggtgatgctctcattgttggaacggcctcgcccgacttggagtataccgggatccgacaataagtttaaagtgcctggcagaaagttttacgtccaccaccacgcctggaaaaccattaaggacgggaaccatcccacaacaggcaaagctattgaacaaagccctaataaccgcactgtagaagctctcgccggcgggaattcctttagcttcgaaattgcctttgagaacctgaaagaatgggagctgggtttgctcatccacagcctgcaactcgaaaagggtctggcgcataaacttggaatggcaaagtctatgggatttggttcagttgaaattgacgtcgaatcagtgcgcctgagaaaagattggaagcaatggcggaatggcaattccgaaattcccaactggttgggaaaaggatttgctaaactgaaggaatggttccgggacgagctcgattttatagaaaatcttaagaaacttctttggtttcctgagggcgaccaagcaccccgggtttgctaccccatgctgcgaaagaaggacgatcctaatgggaatagcggttacgaagaactcaaagacggggaattcaagaaagaagatcggcagaagaagctgaccacgccgtggacaccgtgggcaatggcgatgcaagcggccaagagggcgaacattcgacttccacctgaagtaaatcggatattgtatataagaaatttgccatacaaaatcacagctgaagaaatgtatgatatatttgggaaatatggacctattcgtcaaatcagagtggggaacacacctgaaactagaggaacagcttatgtggtctatgaggacatctttgatgccaagaatgcatgtgatcacctatcgggattcaatgtttgtaacagataccttgtggttttgtactataatgccaacagggcatttcagaagatggacacaaagaagaaggaggaacagttgaagcttctcaaggagaaatatggcatcaacacagatccaccaaaaaaacggacagccgacggaagcgagttcgagtcaccaaagaagaagcggaaagtc

SEQ ID NO: 593 - DNA, 7056 bp, synthetic construct
  source 1..7056: mol_type = other DNA
atgaaacggacagccgacggaagcgagttcgagtcaccaaagaagaagcggaaagtcatgtcggacttcgacgagttcgagcggcagctcaacgagaataaacaagagcgggacaaggagaaccggcatcggaagcgcagccacagccgctctcggagccgggaccgcaaacgccggagccggagccgcgaccggcgcaaccgggaccagcggagcgcctcccgggacaggcgacgacgcagcaaacctttgaccagaggcgctaaagaggagcacggtggactgattcgttccccccgccacgagaagaagaagaaggtccgtaaatactgggacgtgccacccccaggctttgagcacatcaccccaatgcagtacaaggccatgcaagctgcgggtcagattccagccactgctcttctccccaccatgacccctgacggtctggctgtgaccccaacgccggtgcccgtggtcgggagccagatgaccagacaagcccggcgcctctacgtgggcaacatcccctttggcatcactgaggaggccatgatggatttcttcaacgcccagatgcgcctgggggggctgacccaggcccctggcaacccagtgttggctgtgcagattaaccaggacaagaattttgcctttttggagttccgctcagtggacgagactacccaggctatggcctttgatggcatcatcttccagggccagtcactaaagatccgcaggcctcacgactaccagccgcttcctggcatgtcagagaacccctccgtctatgtgcctggggttgtgtccactgtggtccccgactctgcccacaagctgttcatcgggggcttacccaactacctgaacgatgaccaggtcaaagagctgctgacatcctttgggcccctcaaggccttcaacctggtcaaggacagtgccacggggctctccaagggctacgccttctgtgagtacgtggacatcaacgtcacggatcaggccattgcggggctgaacggcatgcagctgggggataagaagctgctggtccagagggcgagtgtgggagccaagaatgccacgctggtgagccccccgagcaccatcaatcagacgcctgtgaccctgcaagtgccgggcttgatgagctcccaggtgcagatgggcggccacccgactgaggtcctgtgcctcatgaacatggtgctgcctgaggagctgctggacgacgaggagtatgaggagatcgtggaggacgtgcgggacgagtgcagcaagtacgggcttgtcaagtccatcgagatcccccggcctgtggacggcgtcgaggtgcccggctgcggaaagatctttgtggagttcacctctgtgtttgactgccagaaagccatgcagggcctgacgggccgcaagttcgccaacagagtggttgtcacaaaatactgtgaccccgactcttatcaccgccgggacttctggacgactactatgaagatttcaattgaattcctcgagccgtttcggatgaccaaatggcaggaaagcactaggcgaaacaagaacaacaaggaatttgttcgcggccaagcttttgcaagatggcatagaaataagaaggataacacaaaagggcggccttacataactgggacattgctgcggtccgcagtaattagaagcgcggaaaacctgctgacattgagtgatgggaaaattagcgaaaagacatgttgtcctgggaaatttgatacggaagataaagacaggttgctgcaattgaggcagcggtccacccttcgttggaccgataagaacccctgtccagataacgctgaaacttactgcccgttttgcgaacttctcgggagatccggtaacgatggaaagaaggctgagaagaaggattggcgctttcgtattcattttggcaatctttcccttccagggaagcccgatttcgacgggccaaaagctataggcagccaacgggtacttaacagggtcgatttcaaatccggtaaggcccatgacttctttaaggcttacgaagtcgaccatactaggtttccccgcttcgaaggggagattaccatagataataaagtcagcgctgaagccaggaaactgctctgtgattctctcaagtttacggatcggctgtgtggagctctgtgcgtaatcaggttcgatgaatatacaccagcagccgatagtgggaaacaaaccgaaaatgtccaagcagaaccgaatgctaatctcgctgaaaagaccgcagagcaaattattagcattctggacgataataagaaaaccgaatatacccgcctgcttgctgatgctattcgttcactccgccgctctagtaaacttgtcgctggcttgccaaaggatcatgacgggaaggatgaccattacctctgggatatcggcaagaagaagaaagacgaaaactctgtcactattaggcaaatccttacgacctcagcagacaccaaggaactcaagaatgccggaaaatggagagaattctgcgagaagctgggtgaagcgctgtacctcaagagtaaagacatgagtggcggcctgaaaattactcggagaatactgggcgatgctgaattccatggaaagcccgatcggcttgaaaagagccggtctgtgtcaatcggatctgtgttgaaagaaactgtggtatgcggcgaactggtcgctaaaacgcccttcttcttcggagcgatagacgaagatgcaaaacaaaccgacctgcaagtactcctcactcccgataacaagtatagactgccaagaagcgccgtgcgaggtatactccgtcgagatcttcaaacctattttgatagcccatgcaatgctgagttgggtggacggccatgcatgtgtaagacgtgtaggattatgagagggatcacggtgatggatgcgcgcagtgagtacaatgccccgccagaaataaggcatcgtacccgcattaatcccttcacaggcacggttgcggaaggtgccctgtttaatatggaagtagcccccgaggggattgtctttccatttcaactccggtaccggggctctgaagatgggctgcccgatgcactgaaaacggtgttgaaatggtgggctgaggggcaggcattcatgagtggcgctgcctcaaccgggaagggccgattccggatggaaaatgctaaatatgaaacgctggatctgagcgacgagaatcaaaggaatgactatcttaagaattggggatggcgtgacgagaaggggctcgaggaactgaagaaacgactgaactcaggtctgccagagcccggtaattatagggatccaaaatggcacgagattaacgtttccattgagatggcaagcccttttattaatggcgacccaatccgcgcagccgtggacaaacgtggtacagatgtggttaccttcgttaagtataaagctgaaggggaagaggcgaaacccgtatgtgcatacaaggccgaatcttttagaggggtgatcagaagtgccgtggcacgcattcatatggaagatggcgtccctttgactgagttgactcacagtgactgtgaatgtctcctgtgccaaatctttggaagtgagtatgaagccggcaaaataaggtttgaagatctcgtattcgaaagtgacccggaacctgtgaccttcgatcatgtggccatcgatagattcactggcggtgcagctgataagaagaaattcgatgattcccctctgcccggtagccctgcaagaccgctcatgttgaaaggctccttctggatccgcagggacgttctcgaggacgaagagtactgtaaggcactcggtaaggctcttgcagatgtgaataatggcctttatcccctcggtggaaagagcgccatcggctacggacaggtcaagagtctgggtataaagggagatgataagaggatttctcgcctcatgaatcctgcctttgatgagacagatgtagccgttccagaaaagcccaaaactgatgccgaggttcgcatcgaggcagagaaagtatattacccacactatttcgtcgaaccccataagaaggtggaacgcgaggagaaaccctgtggtcatcaaaagttccacgaggggcgactgacaggtaaaattcggtgtaagctcattaccaagacacccctcatcgtcccagatactagtaatgacgatttcttcagacctgcggataaagaagctcggaaggaaaaggacgaatatcataaatcatatgctttcttcagacttcataaacaaatcatgattcccgggagcgaattgagaggaatggtgagtagtgtctacgaaactgtgacaaattcttgcttcaggatatttgatgagactaaacggttgtcatggcggatggatgctgatcaccagaatgtgctgcaagactttctcccaggtcgagtgaccgccgatgggaaacatatacaaaagttttccgaaactgcaagggtgcctttctatgacaaaacgcagaaacattttgacattcttgatgagcaagaaattgctggtgagaaacctgttcggatgtgggtcaagcgttttattaaacgactgagcctcgttgatcctgctaaacacccccagaagaaacaagacaataaatggaaaagacgcaaagaaggcatcgccacatttatagagcaaaagaatggctcttattattttaacgtggtcaccaataatggctgcacttctttccacttgtggcataaacctgacaattttgaccaggagaaactcgaaggcatacagaatggtgagaaactggattgctgggtaagagatagtagataccaaaaggcctttcaagagatacccgagaacgacccagacggatgggagtgtaaagagggctaccttcatgtcgtcggccccagcaaagtagagtttagtgacaagaaaggggatgtgatcaataactttcaaggaacactcccatcagttcccaacgactggaaaacaattaggacgaacgattttaagaataggaaaaggaagaatgaacctgtgttttgttgtgaggatgataagggcaattactataccatggctaaatattgcgaaaccttcttcttcgatctgaaggagaacgaggaatacgagatccccgagaaagcaagaatcaaatacaaagaactgctcagggtctataacaacaatcctcaagcagtgccggagagcgtatttcagtctagagttgcccgggaaaacgtggaaaagctgaagtccggagatcttgtgtatttcaaacataatgaaaagtacgtagaggacatcgtcccagtgcggatttcccgaactgtagacgataggatgatcggcaaacgtatgagcgccgatctgcggccgtgccatggagattgggtggaagatggtgatctcagtgccttgaatgcatatcccgagaaaagactcctcttgcgccaccccaaaggactctgccctgcttgccggctctttggaaccggatcttacaagggcagagtcaggtttggattcgcgtcactcgaaaacgatccggagtggctgatcccaggcaagaatcccggcgatccgtttcacggcgggccggtgatgctctcattgttggaacggcctcgcccgacttggagtataccgggatccgacaataagtttaaagtgcctggcagaaagttttacgtccaccaccacgcctggaaaaccattaaggacgggaaccatcccacaacaggcaaagctattgaacaaagccctaataaccgcactgtagaagctctcgccggcgggaattcctttagcttcgaaattgcctttgagaacctgaaagaatgggagctgggtttgctcatccacagcctgcaactcgaaaagggtctggcgcataaacttggaatggcaaagtctatgggatttggttcagttgaaattgacgtcgaatcagtgcgcctgagaaaagattggaagcaatggcggaatggcaattccgaaattcccaactggttgggaaaaggatttgctaaactgaaggaatggttccgggacgagctcgattttatagaaaatcttaagaaacttctttggtttcctgagggcgaccaagcaccccgggtttgctaccccatgctgcgaaagaaggacgatcctaatgggaatagcggttacgaagaactcaaagacggggaattcaagaaagaagatcggcagaagaagctgaccacgccgtggacaccgtgggcaatggcggagtatctggcctccatcttcggcaccgagaaagacaaagtcaactgttcattttatttcaaaattggagcatgtcgtcatggagacaggtgctctcggttgcacaataaaccgacgtttagccagaccattgccctcttgaacatttaccgtaaccctcaaaactcttcccagtctgctgacggtttgcgctgtgccgtgagcgatgtggagatgcaggaacactatgatgagttttttgaggaggtttttacagaaatggaggagaagtatggggaagtagaggagatgaacgtctgtgacaacctgggagaccacctggtggggaacgtgtacgtcaagtttcgccgtgaggaagatgcggaaaaggctgtgattgacttgaataaccgttggtttaatggacagccgctccacgccgagctgtcacccgtgacggacttcagagaagcctgctgccgtcagtatgagatgggagaatgcacacgaggcggcttctgcaacttcatgcatttgaagcccatttccagagagctgcggcgggagctgtatggccgccgtcgcaagaagcatagatcaagatcccgatcccgggagcgtcgttctcggtctagagaccgtggtcgtggcggtggcggtggcggtggtggaggtggcggcggacgggagcgtgacaggaggcggtcgagagatcgtgaaagatctgggcgattcaaacggacagccgacggaagcgagttcgagtcaccaaagaagaagcggaaagtc

SEQ ID NO: 594 - DNA, 3978 bp, synthetic construct
  source 1..3978: mol_type = other DNA
atgaaacggacagccgacggaagcgagttcgagtcaccaaagaagaagcggaaagtcacgactactatgaagatttcaattgaattcctcgagccgtttcggatgaccaaatggcaggaaagcactaggcgaaacaagaacaacaaggaatttgttcgcggccaagcttttgcaagatggcatagaaataagaaggataacacaaaagggcggccttacataactgggacattgctgcggtccgcagtaattagaagcgcggaaaacctgctgacattgagtgatgggaaaattagcgaaaagacatgttgtcctgggaaatttgatacggaagataaagacaggttgctgcaattgaggcagcggtccacccttcgttggaccgataagaacccctgtccagataacgctgaaacttactgcccgttttgcgaacttctcgggagatccggtaacgatggaaagaaggctgagaagaaggattggcgctttcgtattcattttggcaatctttcccttccagggaagcccgatttcgacgggccaaaagctataggcagccaacgggtacttaacagggtcgatttcaaatccggtaaggcccatgacttctttaaggcttacgaagtcgaccatactaggtttccccgcttcgaaggggagattaccatagataataaagtcagcgctgaagccaggaaactgctctgtgattctctcaagtttacggatcggctgtgtggagctctgtgcgtaatcaggttcgatgaatatacaccagcagccgatagtgggaaacaaaccgaaaatgtccaagcagaaccgaatgctaatctcgctgaaaagaccgcagagcaaattattagcattctggacgataataagaaaaccaggtatacccgcctgcttgctgatgctattcgttcactccgccgctctagtaaacttgtcgctggcttgccaaaggatcatgacgggaaggatgaccattacctctgggatatcggcaagaagaagaaagacgaaaactctgtcactattaggcaaatccttacgacctcagcagacaccaaggaactcaagaatgccggaaaatggagagaattctgcgagaagctgggtgaagcgctgtacctcaagagtaaagacatgagtggcggcctgaaaattactcggagaatactgggcgatgctgaattccatggaaagcccgatcggcttgaaaagagccggtctgtgtcaatcggatctgtgttgaaagaaactgtggtatgcggcgaactggtcgctaaaacgcccttcttcttcggagcgatagacgaagatgcaaaacaaaccgacctgcaagtactcctcactcccgataacaagtatagactgccaagaagcgccgtgcgaggtatactccgtcgagatcttcaaacctattttgatagcccatgcaatgctgagttgggtggacggccatgcatgtgtaagacgtgtaggattatgagagggatcacggtgatggatgcgcgcagtgagtacaatgccccgccagaaataaggcatcgtacccgcattaatcccttcacaggcacggttgcggaaggtgccctgtttaatatggaagtagcccccgaggggattgtctttccatttcaactccggtaccggggctctgaagatgggctgcccgatgcactgaaaacggtgttgaaatggtgggctgaggggcaggcattcatgagtggcgctgcctcaaccgggaagggccgattccggatggaaaatgctaaatatgaaacgctggatctgagcgacgagaatcaaaggaatgactatcttaagaattggggatggcgtgacgagaaggggctcgaggaactgaagaaacgactgaactcaggtctgccagagcccggtaattatagggatccaaaatggcacgagattaacgtttccattgagatggcaagcccttttattaatggcgacccaatccgcgcagccgtggacaaacgtggtacagatgtggttaccttcgttaagtataaagctgaaggggaagaggcgaaacccgtatgtgcatacaaggccgaatcttttagaggggtgatcagaagtgccgtggcacgcattcatatggaagatggcgtccctttgactgagttgactcacagtgactgtgaatgtctcctgtgccaaatctttggaagtgagtatgaagccggcaaaataaggtttgaagatctcgtattcgaaagtgacccggaacctgtgaccttcgatcatgtggccatcgatagattcactggcggtgcagctgataagaagaaattcgatgattcccctctgcccggtagccctgcaagaccgctcatgttgaaaggctccttctggatccgcagggacgttctcgaggacgaagagtactgtaaggcactcggtaaggctcttgcagatgtgaataatggcctttatcccctcggtggaaagagcgccatcggctacggacaggtcaagagtctgggtataaagggagatgataagaggatttctcgcctcatgaatcctgcctttgatgagacagatgtagccgttccagaaaagcccaaaactgatgccgaggttcgcatcgaggcagagaaagtatattacccacactatttcgtcgaaccccataagaaggtggaacgcgaggagaaaccctgtggtcatcaaaagttccacgaggggcgactgacaggtaaaattcggtgtaagctcattaccaagacacccctcatcgtcccagatactagtaatgacgatttcttcagacctgcggataaagaagctcggaaggaaaaggacgaatatcataaatcatatgctttcttcagacttcataaacaaatcatgattcccgggagcgaattgagaggaatggtgagtagtgtctacgaaactgtgacaaattcttgcttcaggatatttgatgagactaaacggttgtcatggcgggggggtgggtcacgaactgtagacgataggatgatcggcaaacgtatgagcgccgatctgcggccgtgccatggagattgggtggaagatggtgatctcagtgccttgaatgcatatcccgagaaaagactcctcttgcgccaccccaaaggactctgccctgcttgccggctctttggaaccggatcttacaagggcagagtcaggtttggattcgcgtcactcgaaaacgatccggagtggctgatcccaggcaagaatcccggcgatccgtttcacggcgggccggtgatgctctcattgttggaacggcctcgcccgacttggagtataccgggatccgacaataagtttaaagtgcctggcagaaagttttacgtccaccaccacgcctggaaaaccattaaggacgggaaccatcccacaacaggcaaagctattgaacaaagccctaataaccgcactgtagaagctctcgccggcgggaattcctttagcttcgaaattgcctttgagaacctgaaagaatgggagctgggtttgctcatccacagcctgcaactcgaaaagggtctggcgcataaacttggaatggcaaagtctatgggatttggttcagttgaaattgacgtcgaatcagtgcgcctgagaaaagattggaagcaatggcggaatggcaattccgaaattcccaactggttgggaaaaggatttgctaaactgaaggaatggttccgggacgagctcgattttatagaaaatcttaagaaacttctttggtttcctgagggcgaccaagcaccccgggtttgctaccccatgctgcgaaagaaggacgatcctaatgggaatagcggttacgaagaactcaaaagaggggaattcaagaaagaagatcggcagaagaagctgaccacgccgtggacaccgtgggcaaaacggacagccgacggaagcgagttcgagtcaccaaagaagaagcggaaagtc

SEQ ID NO: 595 - DNA, 5181 bp, synthetic construct
  source 1..5181: mol_type = other DNA
atgaaacggacagccgacggaagcgagttcgagtcaccaaagaagaagcggaaagtcacgactactatgaagatttcaattgaattcctcgagccgtttcggatgaccaaatggcaggaaagcactaggcgaaacaagaacaacaaggaatttgttcgcggccaagcttttgcaagatggcatagaaataagaaggataacacaaaagggcggccttacataactgggacattgctgcggtccgcagtaattagaagcgcggaaaacctgctgacattgagtgatgggaaaattagcgaaaagacatgttgtcctgggaaatttgatacggaagataaagacaggttgctgcaattgaggcagcggtccacccttcgttggaccgataagaacccctgtccagataacgctgaaacttactgcccgttttgcgaacttctcgggagatccggtaacgatggaaagaaggctgagaagaaggattggcgctttcgtattcattttggcaatctttcccttccagggaagcccgatttcgacgggccaaaagctataggcagccaacgggtacttaacagggtcgatttcaaatccggtaaggcccatgacttctttaaggcttacgaagtcgaccatactaggtttccccgcttcgaaggggagattaccatagataataaagtcagcgctgaagccaggaaactgctctgtgattctctcaagtttacggatcggctgtgtggagctctgtgcgtaatcaggttcgatgaatatacaccagcagccgatagtgggaaacaaaccgaaaatgtccaagcagaaccgaatgctaatctcgctgaaaagaccgcagagcaaattattagcattctggacgataataagaaaaccgaatatacccgcctgcttgctgatgctattcgttcactccgccgctctagtaaacttgtcgctggcttgccaaaggatcatgacgggaaggatgaccattacctctgggatatcggcaagaagaagaaagacgaaaactctgtcactattaggcaaatccttacgacctcagcagacaccaaggaactcaagaatgccggaaaatggagagaattctgcgagaagctgggtgaagcgctgtacctcaagagtaaagacatgagtggcggcctgaaaattactcggagaatactgggcgatgctgaattccatggaaagcccgatcggcttgaaaagagccggtctgtgtcaatcggatctgtgttgaaagaaactgtggtatgcggcgaactggtcgctaaaacgcccttcttcttcggagcgatagacgaagatgcaaaacaaaccgacctgcaagtactcctcactcccgataacaagtatagactgccaagaagcgccgtgcgaggtatactccgtcgagatcttcaaacctattttgatagcccatgcaatgctgagttgggtggacggccatgcatgtgtaagacgtgtaggattatgagagggatcacggtgatggatgcgcgcagtgagtacaatgccccgccagaaataaggcatcgtacccgcattaatcccttcacaggcacggttgcggaaggtgccctgtttaatatggaagtagcccccgaggggattgtctttccatttcaactccggtaccggggctctgaagatgggctgcccgatgcactgaaaacggtgttgaaatggtgggctgaggggcaggcattcatgagtggcgctgcctcaaccgggaagggccgattccggatggaaaatgctaaatatgaaacgctggatctgagcgacgagaatcaaaggaatgactatcttaagaattggggatggcgtgacgagaaggggctcgaggaactgaagaaacgactgaactcaggtctgccagagcccggtaattatagggatccaaaatggcacgagattaacgtttccattgagatggcaagcccttttattaatggcgacccaatccgcgcagccgtggacaaacgtggtacagatgtggttaccttcgttaagtataaagctgaaggggaagaggcgaaacccgtatgtgcatacaaggccgaatcttttagaggggtgatcagaagtgccgtggcacgcattcatatggaagatggcgtccctttgactgagttgactcacagtgactgtgaatgtctcctgtgccaaatctttggaagtgagtatgaagccggcaaaataaggtttgaagatctcgtattcgaaagtgacccggaacctgtgaccttcgatcatgtggccatcgatagattcactggcggtgcagctgataagaagaaattcgatgattcccctctgcccggtagccctgcaagaccgctcatgttgaaaggctccttctggatccgcagggacgttctcgaggacgaagagtactgtaaggcactcggtaaggctcttgcagatgtgaataatggcctttatcccctcggtggaaagagcgccatcggctacggacaggtcaagagtctgggtataaagggagatgataagaggatttctcgcctcatgaatcctgcctttgatgagacagatgtagccgttccagaaaagcccaaaactgatgccgaggttcgcatcgaggcagagaaagtatattacccacactatttcgtcgaaccccataagaaggtggaacgcgaggagaaaccctgtggtcatcaaaagttccacgaggggcgactgacaggtaaaattcggtgtaagctcattaccaagacacccctcatcgtcccagatactagtaatgacgatttcttcagacctgcggataaagaagctcggaaggaaaaggacgaatatcataaatcatatgctttcttcagacttcataaacaaatcatgattcccgggagcgaattgagaggaatggtgagtagtgtctacgaaactgtgacaaattcttgcttcaggatatttgatgagactaaacggttgtcatggcgggggggtgggtcacgaactgtagacgataggatgatcggcaaacgtatgagcgccgatctgcggccgtgccatggagattgggtggaagatggtgatctcagtgccttgaatgcatatcccgagaaaagactcctcttgcgccaccccaaaggactctgccctgcttgccggctctttggaaccggatcttacaagggcagagtcaggtttggattcgcgtcactcgaaaacgatccggagtggctgatcccaggcaagaatcccggcgatccgtttcacggcgggccggtgatgctctcattgttggaacggcctcgcccgacttggagtataccgggatccgacaataagtttaaagtgcctggcagaaagttttacgtccaccaccacgcctggaaaaccattaaggacgggaaccatcccacaacaggcaaagctattgaacaaagccctaataaccgcactgtagaagctctcgccggcgggaattcctttagcttcgaaattgcctttgagaacctgaaagaatgggagctgggtttgctcatccacagcctgcaactcgaaaagggtctggcgcataaacttggaatggcaaagtctatgggatttggttcagttgaaattgacgtcgaatcagtgcgcctgagaaaagattggaagcaatggcggaatggcaattccgaaattcccaactggttgggaaaaggatttgctaaactgaaggaatggttccgggacgagctcgattttatagaaaatcttaagaaacttctttggtttcctgagggcgaccaagcaccccgggtttgctaccccatgctgcgaaagaaggacgatcctaatgggaatagcggttacgaagaactcaaagacggggaattcaagaaagaagatcggcagaagaagctgaccacgccgtggacaccgtgggcaatgtccctgtacgatgacctaggagtggagaccagtgactcaaaaacagaaggctggtccaaaaacttcaaacttctgcagtctcagcttcaggtgaagaaggcagctctcactcaggcaaagagccaaaggacgaaacaaagtacagtcctcgccccagtcattgacctgaagcgaggtggctcctcagatgaccggcaaattgtggacactccaccgcatgtagcagctgggctgaaggatcctgttcccagtgggttttctgcaggggaagttctgattcccttagctgacgaatatgaccctatgtttcctaatgattatgagaaagtagtgaagcgccaaagagaggaacgacagagacagcgggagctggaaagacaaaaggaaatagaagaaagggaaaaaaggcgtaaagacagacatgaagcaagtgggtttgcaaggagaccagatccagattctgatgaagatgaagattatgagcgagagaggaggaaaagaagtatgggcggagctgccattgccccacccacttctctggtagagaaagacaaagagttaccccgagattttccttatgaagaggactcaagacctcgatcacagtcttccaaagcagccattcctcccccagtgtacgaggaacaagacagaccgagatctccaaccggacctagcaactccttcctcgctaacatggggggcacggtggcgcacaagatcatgcagaagtacggcttccgggagggccagggtctggggaagcatgagcagggcctgagcactgccttgtcagtggagaagaccagcaagcgtggcggcaagatcatcgtgggcgacgccacagagaaagatgcatccaagaagtcagattcaaatccgctgactgaaatacttaagtgtcctactaaagtggtcttactaaggaacatggttggtgcgggagaggtggatgaagacttggaagttgaaaccaaggaagaatgtgaaaaatatggcaaagttggaaaatgtgtgatatttgaaattcctggtgcccctgatgatgaagcagtacggatatttttagaatttgagagagttgaatcagcaattaaagcggttgttgacttgaatgggaggtattttggtggacgggtggtaaaagcatgtttctacaatttggacaaattcagggtcttggatttggcagaacaagttaaacggacagccgacggaagcgagttcgagtcaccaaagaagaagcggaaagtc

SEQ ID NO: 596 - DNA, 4353 bp, synthetic construct
  source 1..4353: mol_type = other DNA
atgaaacggacagccgacggaagcgagttcgagtcaccaaagaagaagcggaaagtcacgactactatgaagatttcaattgaattcctcgagccgtttcggatgaccaaatggcaggaaagcactaggcgaaacaagaacaacaaggaatttgttcgcggccaagcttttgcaagatggcatagaaataagaaggataacacaaaagggcggccttacataactgggacattgctgcggtccgcagtaattagaagcgcggaaaacctgctgacattgagtgatgggaaaattagcgaaaagacatgttgtcctgggaaatttgatacggaagataaagacaggttgctgcaattgaggcagcggtccacccttcgttggaccgataagaacccctgtccagataacgctgaaacttactgcccgttttgcgaacttctcgggagatccggtaacgatggaaagaaggctgagaagaaggattggcgctttcgtattcattttggcaatctttcccttccagggaagcccgatttcgacgggccaaaagctataggcagccaacgggtacttaacagggtcgatttcaaatccggtaaggcccatgacttctttaaggcttacgaagtcgaccatactaggtttccccgcttcgaaggggagattaccatagataataaagtcagcgctgaagccaggaaactgctctgtgattctctcaagtttacggatcggctgtgtggagctctgtgcgtaatcaggttcgatgaatatacaccagcagccgatagtgggaaacaaaccgaaaatgtccaagcagaaccgaatgctaatctcgctgaaaagaccgcagagcaaattattagcattctggacgataataagaaaaccgaatatacccgcctgcttgctgatgctattcgttcactccgccgctctagtaaacttgtcgctggcttgccaaaggatcatgacgggaaggatgaccattacctctgggatatcggcaagaagaagaaagacgaaaactctgtcactattaggcaaatccttacgacctcagcagacaccaaggaactcaagaatgccggaaaatggagagaattctgcgagaagctgggtgaagcgctgtacctcaagagtaaagacatgagtggcggcctgaaaattactcggagaatactgggcgatgctgaattccatggaaagcccgatcggcttgaaaagagccggtctgtgtcaatcggatctgtgttgaaagaaactgtggtatgcggcgaactggtcgctaaaacgcccttcttcttcggagcgatagacgaagatgcaaaacaaaccgacctgcaagtactcctcactcccgataacaagtatagactgccaagaagcgccgtgcgaggtatactccgtcgagatcttcaaacctattttgatagcccatgcaatgctgagttgggtggacggccatgcatgtgtaagacgtgtaggattatgagagggatcacggtgatggatgcgcgcagtgagtacaatgccccgccagaaataaggcatcgtacccgcattaatcccttcacaggcacggttgcggaaggtgccctgtttaatatggaagtagcccccgaggggattgtctttccatttcaactccggtaccggggctctgaagatgggctgcccgatgcactgaaaacggtgttgaaatggtgggctgaggggcaggcattcatgagtggcgctgcctcaaccgggaagggccgattccggatggaaaatgctaaatatgaaacgctggatctgagcgacgagaatcaaaggaatgactatcttaagaattggggatggcgtgacgagaaggggctcgaggaactgaagaaacgactgaactcaggtctgccagagcccggtaattatagggatccaaaatggcacgagattaacgtttccattgagatggcaagcccttttattaatggcgacccaatccgcgcagccgtggacaaacgtggtacagatgtggttaccttcgttaagtataaagctgaaggggaagaggcgaaacccgtatgtgcatacaaggccgaatcttttagaggggtgatcagaagtgccgtggcacgcattcatatggaagatggcgtccctttgactgagttgactcacagtgactgtgaatgtctcctgtgccaaatctttggaagtgagtatgaagccggcaaaataaggtttgaagatctcgtattcgaaagtgacccggaacctgtgaccttcgatcatgtggccatcgatagattcactggcggtgcagctgataagaagaaattcgatgattcccctctgcccggtagccctgcaagaccgctcatgttgaaaggctccttctggatccgcagggacgttctcgaggacgaagagtactgtaaggcactcggtaaggctcttgcagatgtgaataatggcctttatcccctcggtggaaagagcgccatcggctacggacaggtcaagagtctgggtataaagggagatgataagaggatttctcgcctcatgaatcctgcctttgatgagacagatgtagccgttccagaaaagcccaaaactgatgccgaggttcgcatcgaggcagagaaagtatattacccacactatttcgtcgaaccccataagaaggtggaacgcgaggagaaaccctgtggtcatcaaaagttccacgaggggcgactgacaggtaaaattcggtgtaagctcattaccaagacacccctcatcgtcccagatactagtaatgacgatttcttcagacctgcggataaagaagctcggaaggaaaaggacgaatatcataaatcatatgctttcttcagacttcataaacaaatcatgattcccgggagcgaattgagaggaatggtgagtagtgtctacgaaactgtgacaaattcttgcttcaggatatttgatgagactaaacggttgtcatggcgggggggtgggtcacgaactgtagacgataggatgatcggcaaacgtatgagcgccgatctgcggccgtgccatggagattgggtggaagatggtgatctcagtgccttgaatgcatatcccgagaaaagactcctcttgcgccaccccaaaggactctgccctgcttgccggctctttggaaccggatcttacaagggcagagtcaggtttggattcgcgtcactcgaaaacgatccggagtggctgatcccaggcaagaatcccggcgatccgtttcacggcgggccggtgatgctctcattgttggaacggcctcgcccgacttggagtataccgggatccgacaataagtttaaagtgcctggcagaaagttttacgtccaccaccacgcctggaaaaccattaaggacgggaaccatcccacaacaggcaaagctattgaacaaagccctaataaccgcactgtagaagctctcgccggcgggaattcctttagcttcgaaattgcctttgagaacctgaaagaatgggagctgggtttgctcatccacagcctgcaactcgaaaagggtctggcgcataaacttggaatggcaaagtctatgggatttggttcagttgaaattgacgtcgaatcagtgcgcctgagaaaagattggaagcaatggcggaatggcaattccgaaattcccaactggttgggaaaaggatttgctaaactgaaggaatggttccgggacgagctcgattttatagaaaatcttaagaaacttctttggtttcctgagggcgaccaagcaccccgggtttgctaccccatgctgcgaaagaaggacgatcctaatgggaatagcggttacgaagaactcaaagacggggaattcaagaaagaagatcggcagaagaagctgaccacgccgtggacaccgtgggcaatggcgatgcaagcggccaagagggcgaacattcgacttccacctgaagtaaatcggatattgtatataagaaatttgccatacaaaatcacagctgaagaaatgtatgatatatttgggaaatatggacctattcgtcaaatcagagtggggaacacacctgaaactagaggaacagcttatgtggtctatgaggacatctttgatgccaagaatgcatgtgatcacctatcgggattcaatgtttgtaacagataccttgtggttttgtactataatgccaacagggcatttcagaagatggacacaaagaagaaggaggaacagttgaagcttctcaaggagaaatatggcatcaacacagatccaccaaaaaaacggacagccgacggaagcgagttcgagtcaccaaagaagaagcggaaagtc

SEQ ID NO: 597 - DNA, 4698 bp, synthetic construct
  source 1..4698: mol_type = other DNA
atgaaacggacagccgacggaagcgagttcgagtcaccaaagaagaagcggaaagtcacgactactatgaagatttcaattgaattcctcgagccgtttcggatgaccaaatggcaggaaagcactaggcgaaacaagaacaacaaggaatttgttcgcggccaagcttttgcaagatggcatagaaataagaaggataacacaaaagggcggccttacataactgggacattgctgcggtccgcagtaattagaagcgcggaaaacctgctgacattgagtgatgggaaaattagcgaaaagacatgttgtcctgggaaatttgatacggaagataaagacaggttgctgcaattgaggcagcggtccacccttcgttggaccgataagaacccctgtccagataacgctgaaacttactgcccgttttgcgaacttctcgggagatccggtaacgatggaaagaaggctgagaagaaggattggcgctttcgtattcattttggcaatctttcccttccagggaagcccgatttcgacgggccaaaagctataggcagccaacgggtacttaacagggtcgatttcaaatccggtaaggcccatgacttctttaaggcttacgaagtcgaccatactaggtttccccgcttcgaaggggagattaccatagataataaagtcagcgctgaagccaggaaactgctctgtgattctctcaagtttacggatcggctgtgtggagctctgtgcgtaatcaggttcgatgaatatacaccagcagccgatagtgggaaacaaaccgaaaatgtccaagcagaaccgaatgctaatctcgctgaaaagaccgcagagcaaattattagcattctggacgataataagaaaaccgaatatacccgcctgcttgctgatgctattcgttcactccgccgctctagtaaacttgtcgctggcttgccaaaggatcatgacgggaaggatgaccattacctctgggatatcggcaagaagaagaaagacgaaaactctgtcactattaggcaaatccttacgacctcagcagacaccaaggaactcaagaatgccggaaaatggagagaattctgcgagaagctgggtgaagcgctgtacctcaagagtaaagacatgagtggcggcctgaaaattactcggagaatactgggcgatgctgaattccatggaaagcccgatcggcttgaaaagagccggtctgtgtcaatcggatctgtgttgaaagaaactgtggtatgcggcgaactggtcgctaaaacgcccttcttcttcggagcgatagacgaagatgcaaaacaaaccgacctgcaagtactcctcactcccgataacaagtatagactgccaagaagcgccgtgcgaggtatactccgtcgagatcttcaaacctattttgatagcccatgcaatgctgagttgggtggacggccatgcatgtgtaagacgtgtaggattatgagagggatcacggtgatggatgcgcgcagtgagtacaatgccccgccagaaataaggcatcgtacccgcattaatcccttcacaggcacggttgcggaaggtgccctgtttaatatggaagtagcccccgaggggattgtctttccatttcaactccggtaccggggctctgaagatgggctgcccgatgcactgaaaacggtgttgaaatggtgggctgaggggcaggcattcatgagtggcgctgcctcaaccgggaagggccgattccggatggaaaatgctaaatatgaaacgctggatctgagcgacgagaatcaaaggaatgactatcttaagaattggggatggcgtgacgagaaggggctcgaggaactgaagaaacgactgaactcaggtctgccagagcccggtaattatagggatccaaaatggcacgagattaacgtttccattgagatggcaagcccttttattaatggcgacccaatccgcgcagccgtggacaaacgtggtacagatgtggttaccttcgttaagtataaagctgaaggggaagaggcgaaacccgtatgtgcatacaaggccgaatcttttagaggggtgatcagaagtgccgtggcacgcattcatatggaagatggcgtccctttgactgagttgactcacagtgactgtgaatgtctcctgtgccaaatctttggaagtgagtatgaagccggcaaaataaggtttgaagatctcgtattcgaaagtgacccggaacctgtgaccttcgatcatgtggccatcgatagattcactggcggtgcagctgataagaagaaattcgatgattcccctctgcccggtagccctgcaagaccgctcatgttgaaaggctccttctggatccgcagggacgttctcgaggacgaagagtactgtaaggcactcggtaaggctcttgcagatgtgaataatggcctttatcccctcggtggaaagagcgccatcggctacggacaggtcaagagtctgggtataaagggagatgataagaggatttctcgcctcatgaatcctgcctttgatgagacagatgtagccgttccagaaaagcccaaaactgatgccgaggttcgcatcgaggcagagaaagtatattacccacactatttcgtcgaaccccataagaaggtggaacgcgaggagaaaccctgtggtcatcaaaagttccacgaggggcgactgacaggtaaaattcggtgtaagctcattaccaagacacccctcatcgtcccagatactagtaatgacgatttcttcagacctgcggataaagaagctcggaaggaaaaggacgaatatcataaatcatatgctttcttcagacttcataaacaaatcatgattcccgggagcgaattgagaggaatggtgagtagtgtctacgaaactgtgacaaattcttgcttcaggatatttgatgagactaaacggttgtcatggcgggggggtgggtcacgaactgtagacgataggatgatcggcaaacgtatgagcgccgatctgcggccgtgccatggagattgggtggaagatggtgatctcagtgccttgaatgcatatcccgagaaaagactcctcttgcgccaccccaaaggactctgccctgcttgccggctctttggaaccggatcttacaagggcagagtcaggtttggattcgcgtcactcgaaaacgatccggagtggctgatcccaggcaagaatcccggcgatccgtttcacggcgggccggtgatgctctcattgttggaacggcctcgcccgacttggagtataccgggatccgacaataagtttaaagtgcctggcagaaagttttacgtccaccaccacgcctggaaaaccattaaggacgggaaccatcccacaacaggcaaagctattgaacaaagccctaataaccgcactgtagaagctctcgccggcgggaattcctttagcttcgaaattgcctttgagaacctgaaagaatgggagctgggtttgctcatccacagcctgcaactcgaaaagggtctggcgcataaacttggaatggcaaagtctatgggatttggttcagttgaaattgacgtcgaatcagtgcgcctgagaaaagattggaagcaatggcggaatggcaattccgaaattcccaactggttgggaaaaggatttgctaaactgaaggaatggttccgggacgagctcgattttatagaaaatcttaagaaacttctttggtttcctgagggcgaccaagcaccccgggtttgctaccccatgctgcgaaagaaggacgatcctaatgggaatagcggttacgaagaactcaaagacggggaattcaagaaagaagatcggcagaagaagctgaccacgccgtggacaccgtgggcaatggcggagtatctggcctccatcttcggcaccgagaaagacaaagtcaactgttcattttatttcaaaattggagcatgtcgtcatggagacaggtgctctcggttgcacaataaaccgacgtttagccagaccattgccctcttgaacatttaccgtaaccctcaaaactcttcccagtctgctgacggtttgcgctgtgccgtgagcgatgtggagatgcaggaacactatgatgagttttttgaggaggtttttacagaaatggaggagaagtatggggaagtagaggagatgaacgtctgtgacaacctgggagaccacctggtggggaacgtgtacgtcaagtttcgccgtgaggaagatgcggaaaaggctgtgattgacttgaataaccgttggtttaatggacagccgatccacgccgagctgtcacccgtgacggacttcagagaagcctgctgccgtcagtatgagatgggagaatgcacacgaggcggcttctgcaacttcatgcatttgaagcccatttccagagagctgcggcgggagctgtatggccgccgtcgcaagaagcatagatcaagatcccgatcccgggagcgtcgttctcggtctagagaccgtggtcgtggcggtggcggtggcggtggtggaggtggcggcggacgggagcgtgacaggaggcggtcgagagatcgtgaaagatctgggcgattcaaacggacagccgacggaagcgagttcgagtcaccaaagaagaagcggaaagtc

SEQ ID NO: 598 - DNA, 5403 bp, synthetic construct
  source 1..5403: mol_type = other DNA
atgaaacggacagccgacggaagcgagttcgagtcaccaaagaagaagcggaaagtcacgactactatgaagatttcaattgaattcctcgagccgtttcggatgaccaaatggcaggaaagcactaggcgaaacaagaacaacaaggaatttgttcgcggccaagcttttgcaagatggcatagaaataagaaggataacacaaaagggcggccttacataactgggacattgctgcggtccgcagtaattagaagcgcggaaaacctgctgacattgagtgatgggaaaattagcgaaaagacatgttgtcctgggaaatttgatacggaagataaagacaggttgctgcaattgaggcagcggtccacccttcgttggaccgataagaacccctgtccagataacgctgaaacttactgcccgttttgcgaacttctcgggagatccggtaacgatggaaagaaggctgagaagaaggattggcgctttcgtattcattttggcaatctttcccttccagggaagcccgatttcgacgggccaaaagctataggcagccaacgggtacttaacagggtcgatttcaaatccggtaaggcccatgacttctttaaggcttacgaagtcgaccatactaggtttccccgcttcgaaggggagattaccatagataataaagtcagcgctgaagccaggaaactgctctgtgattctctcaagtttacggatcggctgtgtggagctctgtgcgtaatcaggttcgatgaatatacaccagcagccgatagtgggaaacaaaccgaaaatgtccaagcagaaccgaatgctaatctcgctgaaaagaccgcagagcaaattattagcattctggacgataataagaaaaccgaatatacccgcctgcttgctgatgctattcgttcactccgccgctctagtaaacttgtcgctggcttgccaaaggatcatgacgggaaggatgaccattacctctgggatatcggcaagaagaagaaagacgaaaactctgtcactattaggcaaatccttacgacctcagcagacaccaaggaactcaagaatgccggaaaatggagagaattctgcgagaagctgggtgaagcgctgtacctcaagagtaaagacatgagtggcggcctgaaaattactcggagaatactgggcgatgctgaattccatggaaagcccgatcggcttgaaaagagccggtctgtgtcaatcggatctgtgttgaaagaaactgtggtatgcggcgaactggtcgctaaaacgcccttcttcttcggagcgatagacgaagatgcaaaacaaaccgacctgcaagtactcctcactcccgataacaagtatagactgccaagaagcgccgtgcgaggtatactccgtcgagatcttcaaacctattttgatagcccatgcaatgctgagttgggtggacggccatgcatgtgtaagacgtgtaggattatgagagggatcacggtgatggatgcgcgcagtgagtacaatgccccgccagaaataaggcatcgtacccgcattaatcccttcacaggcacggttgcggaaggtgccctgtttaatatggaagtagcccccgaggggattgtctttccatttcaactccggtaccggggctctgaagatgggctgcccgatgcactgaaaacggtgttgaaatggtgggctgaggggcaggcattcatgagtggcgctgcctcaaccgggaagggccgattccggatggaaaatgctaaatatgaaacgctggatctgagcgacgagaatcaaaggaatgactatcttaagaattggggatggcgtgacgagaaggggctcgaggaactgaagaaacgactgaactcaggtctgccagagcccggtaattatagggatccaaaatggcacgagattaacgtttccattgagatggcaagcccttttattaatggcgacccaatccgcgcagccgtggacaaacgtggtacagatgtggttaccttcgttaagtataaagctgaaggggaagaggcgaaacccgtatgtgcatacaaggccgaatcttttagaggggtgatcagaagtgccgtggcacgcattcatatggaagatggcgtccctttgactgagttgactcacagtgactgtgaatgtctcctgtgccaaatctttggaagtgagtatgaagccggcaaaataaggtttgaagatctcgtattcgaaagtgacccggaacctgtgaccttcgatcatgtggccatcgatagattcactggcggtgcagctgataagaagaaattcgatgattcccctctgcccggtagccctgcaagaccgctcatgttgaaaggctccttctggatccgcagggacgttctcgaggacgaagagtactgtaaggcactcggtaaggctcttgcagatgtgaataatggcctttatcccctcggtggaaagagcgccatcggctacggacaggtcaagagtctgggtataaagggagatgataagaggatttctcgcctcatgaatcctgcctttgatgagacagatgtagccgttccagaaaagcccaaaactgatgccgaggttcgcatcgaggcagagaaagtatattacccacactatttcgtcgaaccccataagaaggtggaacgcgaggagaaaccctgtggtcatcaaaagttccacgaggggcgactgacaggtaaaattcggtgtaagctcattaccaagacacccctcatcgtcccagatactagtaatgacgatttcttcagacctgcggataaagaagctcggaaggaaaaggacgaatatcataaatcatatgctttcttcagacttcataaacaaatcatgattcccgggagcgaattgagaggaatggtgagtagtgtctacgaaactgtgacaaattcttgcttcaggatatttgatgagactaaacggttgtcatggcgggggggtgggtcacgaactgtagacgataggatgatcggcaaacgtatgagcgccgatctgcggccgtgccatggagattgggtggaagatggtgatctcagtgccttgaatgcatatcccgagaaaagactcctcttgcgccaccccaaaggactctgccctgcttgccggctctttggaaccggatcttacaagggcagagtcaggtttggattcgcgtcactcgaaaacgatccggagtggctgatcccaggcaagaatcccggcgatccgtttcacggcgggccggtgatgctctcattgttggaacggcctcgcccgacttggagtataccgggatccgacaataagtttaaagtgcctggcagaaagttttacgtccaccaccacgcctggaaaaccattaaggacgggaaccatcccacaacaggcaaagctattgaacaaagccctaataaccgcactgtagaagctctcgccggcgggaattcctttagcttcgaaattgcctttgagaacctgaaagaatgggagctgggtttgctcatccacagcctgcaactcgaaaagggtctggcgcataaacttggaatggcaaagtctatgggatttggttcagttgaaattgacgtcgaatcagtgcgcctgagaaaagattggaagcaatggcggaatggcaattccgaaattcccaactggttgggaaaaggatttgctaaactgaaggaatggttccgggacgagctcgattttatagaaaatcttaagaaacttctttggtttcctgagggcgaccaagcaccccgggtttgctaccccatgctgcgaaagaaggacgatcctaatgggaatagcggttacgaagaactcaaagacggggaattcaagaaagaagatcggcagaagaagctgaccacgccgtggacaccgtgggcaatgtcggacttcgacgagttcgagcggcagctcaacgagaataaacaagagcgggacaaggagaaccggcatcggaagcgcagccacagccgctctcggagccgggaccgcaaacgccggagccggagccgcgaccggcgcaaccgggaccagcggagcgcctcccgggacaggcgacgacgcagcaaacctttgaccagaggcgctaaagaggagcacggtggactgattcgttccccccgccacgagaagaagaagaaggtccgtaaatactgggacgtgccacccccaggctttgagcacatcaccccaatgcagtacaaggccatgcaagctgcgggtcagattccagccactgctcttctccccaccatgacccctgacggtctggctgtgaccccaacgccggtgcccgtggtcgggagccagatgaccagacaagcccggcgcctctacgtgggcaacatcccctttggcatcactgaggaggccatgatggatttcttcaacgcccagatgcgcctgggggggctgacccaggcccctggcaacccagtgttggctgtgcagattaaccaggacaagaattttgcctttttggagttccgctcagtggacgagactacccaggctatggcctttgatggcatcatcttccagggccagtcactaaagatccgcaggcctcacgactaccagccgcttcctggcatgtcagagaacccctccgtctatgtgcctggggttgtgtccactgtggtccccgactctgcccacaagctgttcatcgggggcttacccaactacctgaacgatgaccaggtcaaagagctgctgacatcctttgggcccctcaaggccttcaacctggtcaaggacagtgccacggggctctccaagggctacgccttctgtgagtacgtggacatcaacgtcacggatcaggccattgcggggctgaacggcatgcagctgggggataagaagctgctggtccagagggcgagtgtgggagccaagaatgccacgctggtgagccccccgagcaccatcaatcagacgcctgtgaccctgcaagtgccgggcttgatgagctcccaggtgcagatgggcggccacccgactgaggtcctgtgcctcatgaacatggtgctgcctgaggagctgctggacgacgaggagtatgaggagatcgtggaggacgtgcgggacgagtgcagcaagtacgggcttgtcaagtccatcgagatcccccggcctgtggacggcgtcgaggtgcccggctgcggaaagatctttgtggagttcacctctgtgtttgactgccagaaagccatgcagggcctgacgggccgcaagttcgccaacagagtggttgtcacaaaatactgtgaccccgactcttatcaccgccgggacttctggaaacggacagccgacggaagcgagttcgagtcaccaaagaagaagcggaaagtc

SEQ ID NO: 599 - DNA, 5181 bp, synthetic construct
  source 1..5181: mol_type = other DNA
atgaaacggacagccgacggaagcgagttcgagtcaccaaagaagaagcggaaagtcacgactactatgaagatttcaattgaattcctcgagccgtttcggatgaccaaatggcaggaaagcactaggcgaaacaagaacaacaaggaatttgttcgcggccaagcttttgcaagatggcatagaaataagaaggataacacaaaagggcggccttacataactgggacattgctgcggtccgcagtaattagaagcgcggaaaacctgctgacattgagtgatgggaaaattagcgaaaagacatgttgtcctgggaaatttgatacggaagataaagacaggttgctgcaattgaggcagcggtccacccttcgttggaccgataagaacccctgtccagataacgctgaaacttactgcccgttttgcgaacttctcgggagatccggtaacgatggaaagaaggctgagaagaaggattggcgctttcgtattcattttggcaatctttcccttccagggaagcccgatttcgacgggccaaaagctataggcagccaacgggtacttaacagggtcgatttcaaatccggtaaggcccatgacttctttaaggcttacgaagtcgaccatactaggtttccccgcttcgaaggggagattaccatagataataaagtcagcgctgaagccaggaaactgctctgtgattctctcaagtttacggatcggctgtgtggagctctgtgcgtaatcaggttcgatgaatatacaccagcagccgatagtgggaaacaaaccgaaaatgtccaagcagaaccgaatgctaatctcgctgaaaagaccgcagagcaaattattagcattctggacgataataagaaaaccgaaaagacccgcctgcttgctgatgctattcgttcactccgccgctctagtaaacttgtcgctggcttgccaaaggatcatgacgggaaggatgaccattacctctgggatatcggcaagaagaagaaagacgaaaactctgtcactattaggcaaatccttacgacctcagcagacaccaaggaactcaagaatgccggaaaatggagagaattctgcgagaagctgggtgaagcgctgtacctcaagagtaaagacatgagtggcggcctgaaaattactcggagaatactgggcgatgctgaattccatggaaagcccgatcggcttgaaaagagccggtctgtgtcaatcggatctgtgttgaaagaaactgtggtatgcggcgaactggtcgctaaaacgcccttcttcttcggagcgatagacgaagatgcaaaacaaaccgacctgcaagtactcctcactcccgataacaagtatagactgccaagaagcgccgtgcgaggtatactccgtcgagatcttcaaacctattttgatagcccatgcaatgctgagttgggtggacggccatgcatgtgtaagacgtgtaggattatgagagggatcacggtgatggatgcgcgcagtgagtacaatgccccgccagaaataaggcatcgtacccgcattaatcccttcacaggcacggttgcggaaggtgccctgtttaatatggaagtagcccccgaggggattgtctttccatttcaactccggtaccggggctctgaagatgggctgcccgatgcactgaaaacggtgttgaaatggtgggctgaggggcaggcattcatgagtggcgctgcctcaaccgggaagggccgattccggatggaaaatgctaaatatgaaacgctggatctgagcgacgagaatcaaaggaatgactatcttaagaattggggatggcgtgacgagaaggggctcgaggaactgaagaaacgactgaactcaggtctgccagagcccggtaattatagggatccaaaatggcacgagattaacgtttccattgagatggcaagcccttttattaatggcgacccaatccgcgcagccgtggacaaacgtggtacagatgtggttaccttcgttaagtataaagctgaaggggaagaggcgaaacccgtatgtgcatacaaggccgaatcttttagaggggtgatcagaagtgccgtggcacgcattcatatggaagatggcgtccctttgactgagttgactcacagtgactgtgaatgtctcctgtgccaaatctttggaagtgagtatgaagccggcaaaataaggtttgaagatctcgtattcgaaagtgacccggaacctgtgaccttcgatcatgtggccatcgatagattcactggcggtgcagctgataagaagaaattcgatgattcccctctgcccggtagccctgcaagaccgctcatgttgaaaggctccttctggatccgcagggacgttctcgaggacgaagagtactgtaaggcactcggtaaggctcttgcagatgtgaataatggcctttatcccctcggtggaaagagcgccatcggctacggacaggtcaagagtctgggtataaagggagatgataagaggatttctcgcctcatgaatcctgcctttgatgagacagatgtagccgttccagaaaagcccaaaactgatgccgaggttcgcatcgaggcagagaaagtatattacccacactatttcgtcgaaccccataagaaggtggaacgcgaggagaaaccctgtggtcatcaaaagttccacgaggggcgactgacaggtaaaattcggtgtaagctcattaccaagacacccctcatcgtcccagatactagtaatgacgatttcttcagacctgcggataaagaagctcggaaggaaaaggacgaatatcataaatcatatgctttcttcagacttcataaacaaatcatgattcccgggagcgaattgagaggaatggtgagtagtgtctacgaaactgtgacaaattcttgcttcaggatatttgatgagactaaacggttgtcatggcgggggggtgggtcacgaactgtagacgataggatgatcggcaaacgtatgagcgccgatctgcggccgtgccatggagattgggtggaagatggtgatctcagtgccttgaatgcatatcccgagaaaagactcctcttgcgccaccccaaaggactctgccctgcttgccggctctttggaaccggatcttacaagggcagagtcaggtttggattcgcgtcactcgaaaacgatccggagtggctgatcccaggcaagaatcccggcgatccgtttcacggcgggccggtgatgctctcattgttggaacggcctcgcccgacttggagtataccgggatccgacaataagtttaaagtgcctggcagaaagttttacgtccaccaccacgcctggaaaaccattaaggacgggaaccatcccacaacaggcaaagctattgaacaaagccctaataaccgcactgtagaagctctcgccggcgggaattcctttagcttcgaaattgcctttgagaacctgaaagaatgggagctgggtttgctcatccacagcctgcaactcgaaaagggtctggcgcataaacttggaatggcaaagtctatgggatttggttcagttgaaattgacgtcgaatcagtgcgcctgagaaaagattggaagcaatggcggaatggcaattccgaaattcccaactggttgggaaaaggatttgctaaactgaaggaatggttccgggacgagctcgattttatagaaaatcttaagaaacttctttggtttcctgagggcgaccaagcaccccgggtttgctaccccatgctgcgaaagaaggacgatcctaatgggaatagcggttacgaagaactcaaaagaggggaattcaagaaagaagatcggcagaagaagctgaccacgccgtggacaccgtgggcaatgtccctgtacgatgacctaggagtggagaccagtgactcaaaaacagaaggctggtccaaaaacttcaaacttctgcagtctcagcttcaggtgaagaaggcagctctcactcaggcaaagagccaaaggacgaaacaaagtacagtcctcgccccagtcattgacctgaagcgaggtggctcctcagatgaccggcaaattgtggacactccaccgcatgtagcagctgggctgaaggatcctgttcccagtgggttttctgcaggggaagttctgattcccttagctgacgaatatgaccctatgtttcctaatgattatgagaaagtagtgaagcgccaaagagaggaacgacagagacagcgggagctggaaagacaaaaggaaatagaagaaagggaaaaaaggcgtaaagacagacatgaagcaagtgggtttgcaaggagaccagatccagattctgatgaagatgaagattatgagcgagagaggaggaaaagaagtatgggcggagctgccattgccccacccacttctctggtagagaaagacaaagagttaccccgagattttccttatgaagaggactcaagacctcgatcacagtcttccaaagcagccattcctcccccagtgtacgaggaacaagacagaccgagatctccaaccggacctagcaactccttcctcgctaacatggggggcacggtggcgcacaagatcatgcagaagtacggcttccgggagggccagggtctggggaagcatgagcagggcctgagcactgccttgtcagtggagaagaccagcaagcgtggcggcaagatcatcgtgggcgacgccacagagaaagatgcatccaagaagtcagattcaaatccgctgactgaaatacttaagtgtcctactaaagtggtcttactaaggaacatggttggtgcgggagaggtggatgaagacttggaagttgaaaccaaggaagaatgtgaaaaatatggcaaagttggaaaatgtgtgatatttgaaattcctggtgcccctgatgatgaagcagtacggatatttttagaatttgagagagttgaatcagcaattaaagcggttgttgacttgaatgggaggtattttggtggacgggtggtaaaagcatgtttctacaatttggacaaattcagggtcttggatttggcagaacaagttaaacggacagccgacggaagcgagttcgagtcaccaaagaagaagcggaaagtc

SEQ ID NO: 600 - DNA, 4353 bp, synthetic construct
  source 1..4353: mol_type = other DNA
atgaaacggacagccgacggaagcgagttcgagtcaccaaagaagaagcggaaagtcacgactactatgaagatttcaattgaattcctcgagccgtttcggatgaccaaatggcaggaaagcactaggcgaaacaagaacaacaaggaatttgttcgcggccaagcttttgcaagatggcatagaaataagaaggataacacaaaagggcggccttacataactgggacattgctgcggtccgcagtaattagaagcgcggaaaacctgctgacattgagtgatgggaaaattagcgaaaagacatgttgtcctgggaaatttgatacggaagataaagacaggttgctgcaattgaggcagcggtccacccttcgttggaccgataagaacccctgtccagataacgctgaaacttactgcccgttttgcgaacttctcgggagatccggtaacgatggaaagaaggctgagaagaaggattggcgctttcgtattcattttggcaatctttcccttccagggaagcccgatttcgacgggccaaaagctataggcagccaacgggtacttaacagggtcgatttcaaatccggtaaggcccatgacttctttaaggcttacgaagtcgaccatactaggtttccccgcttcgaaggggagattaccatagataataaagtcagcgctgaagccaggaaactgctctgtgattctctcaagtttacggatcggctgtgtggagctctgtgcgtaatcaggttcgatgaatatacaccagcagccgatagtgggaaacaaaccgaaaatgtccaagcagaaccgaatgctaatctcgctgaaaagaccgcagagcaaattattagcattctggacgataataagaaaaccgaaaagacccgcctgcttgctgatgctattcgttcactccgccgctctagtaaacttgtcgctggcttgccaaaggatcatgacgggaaggatgaccattacctctgggatatcggcaagaagaagaaagacgaaaactctgtcactattaggcaaatccttacgacctcagcagacaccaaggaactcaagaatgccggaaaatggagagaattctgcgagaagctgggtgaagcgctgtacctcaagagtaaagacatgagtggcggcctgaaaattactcggagaatactgggcgatgctgaattccatggaaagcccgatcggcttgaaaagagccggtctgtgtcaatcggatctgtgttgaaagaaactgtggtatgcggcgaactggtcgctaaaacgcccttcttcttcggagcgatagacgaagatgcaaaacaaaccgacctgcaagtactcctcactcccgataacaagtatagactgccaagaagcgccgtgcgaggtatactccgtcgagatcttcaaacctattttgatagcccatgcaatgctgagttgggtggacggccatgcatgtgtaagacgtgtaggattatgagagggatcacggtgatggatgcgcgcagtgagtacaatgccccgccagaaataaggcatcgtacccgcattaatcccttcacaggcacggttgcggaaggtgccctgtttaatatggaagtagcccccgaggggattgtctttccatttcaactccggtaccggggctctgaagatgggctgcccgatgcactgaaaacggtgttgaaatggtgggctgaggggcaggcattcatgagtggcgctgcctcaaccgggaagggccgattccggatggaaaatgctaaatatgaaacgctggatctgagcgacgagaatcaaaggaatgactatcttaagaattggggatggcgtgacgagaaggggctcgaggaactgaagaaacgactgaactcaggtctgccagagcccggtaattatagggatccaaaatggcacgagattaacgtttccattgagatggcaagcccttttattaatggcgacccaatccgcgcagccgtggacaaacgtggtacagatgtggttaccttcgttaagtataaagctgaaggggaagaggcgaaacccgtatgtgcatacaaggccgaatcttttagaggggtgatcagaagtgccgtggcacgcattcatatggaagatggcgtccctttgactgagttgactcacagtgactgtgaatgtctcctgtgccaaatctttggaagtgagtatgaagccggcaaaataaggtttgaagatctcgtattcgaaagtgacccggaacctgtgaccttcgatcatgtggccatcgatagattcactggcggtgcagctgataagaagaaattcgatgattcccctctgcccggtagccctgcaagaccgctcatgttgaaaggctccttctggatccgcagggacgttctcgaggacgaagagtactgtaaggcactcggtaaggctcttgcagatgtgaataatggcctttatcccctcggtggaaagagcgccatcggctacggacaggtcaagagtctgggtataaagggagatgataagaggatttctcgcctcatgaatcctgcctttgatgagacagatgtagccgttccagaaaagcccaaaactgatgccgaggttcgcatcgaggcagagaaagtatattacccacactatttcgtcgaaccccataagaaggtggaacgcgaggagaaaccctgtggtcatcaaaagttccacgaggggcgactgacaggtaaaattcggtgtaagctcattaccaagacacccctcatcgtcccagatactagtaatgacgatttcttcagacctgcggataaagaagctcggaaggaaaaggacgaatatcataaatcatatgctttcttcagacttcataaacaaatcatgattcccgggagcgaattgagaggaatggtgagtagtgtctacgaaactgtgacaaattcttgcttcaggatatttgatgagactaaacggttgtcatggcgggggggtgggtcacgaactgtagacgataggatgatcggcaaacgtatgagcgccgatctgcggccgtgccatggagattgggtggaagatggtgatctcagtgccttgaatgcatatcccgagaaaagactcctcttgcgccaccccaaaggactctgccctgcttgccggctctttggaaccggatcttacaagggcagagtcaggtttggattcgcgtcactcgaaaacgatccggagtggctgatcccaggcaagaatcccggcgatccgtttcacggcgggccggtgatgctctcattgttggaacggcctcgcccgacttggagtataccgggatccgacaataagtttaaagtgcctggcagaaagttttacgtccaccaccacgcctggaaaaccattaaggacgggaaccatcccacaacaggcaaagctattgaacaaagccctaataaccgcactgtagaagctctcgccggcgggaattcctttagcttcgaaattgcctttgagaacctgaaagaatgggagctgggtttgctcatccacagcctgcaactcgaaaagggtctggcgcataaacttggaatggcaaagtctatgggatttggttcagttgaaattgacgtcgaatcagtgcgcctgagaaaagattggaagcaatggcggaatggcaattccgaaattcccaactggttgggaaaaggatttgctaaactgaaggaatggttccgggacgagctcgattttatagaaaatcttaagaaacttctttggtttcctgagggcgaccaagcaccccgggtttgctaccccatgctgcgaaagaaggacgatcctaatgggaatagcggttacgaagaactcaaaagaggggaattcaagaaagaagatcggcagaagaagctgaccacgccgtggacaccgtgggcaatggcgatgcaagcggccaagagggcgaacattcgacttccacctgaagtaaatcggatattgtatataagaaatttgccatacaaaatcacagctgaagaaatgtatgatatatttgggaaatatggacctattcgtcaaatcagagtggggaacacacctgaaactagaggaacagcttatgtggtctatgaggacatctttgatgccaagaatgcatgtgatcacctatcgggattcaatgtttgtaacagataccttgtggttttgtactataatgccaacagggcatttcagaagatggacacaaagaagaaggaggaacagttgaagcttctcaaggagaaatatggcatcaacacagatccaccaaaaaaacggacagccgacggaagcgagttcgagtcaccaaagaagaagcggaaagtc

SEQ ID NO: 601 - DNA, 4698 bp, synthetic construct
  source 1..4698: mol_type = other DNA
atgaaacggacagccgacggaagcgagttcgagtcaccaaagaagaagcggaaagtcacgactactatgaagatttcaattgaattcctcgagccgtttcggatgaccaaatggcaggaaagcactaggcgaaacaagaacaacaaggaatttgttcgcggccaagcttttgcaagatggcatagaaataagaaggataacacaaaagggcggccttacataactgggacattgctgcggtccgcagtaattagaagcgcggaaaacctgctgacattgagtgatgggaaaattagcgaaaagacatgttgtcctgggaaatttgatacggaagataaagacaggttgctgcaattgaggcagcggtccacccttcgttggaccgataagaacccctgtccagataacgctgaaacttactgcccgttttgcgaacttctcgggagatccggtaacgatggaaagaaggctgagaagaaggattggcgctttcgtattcattttggcaatctttcccttccagggaagcccgatttcgacgggccaaaagctataggcagccaacgggtacttaacagggtcgatttcaaatccggtaaggcccatgacttctttaaggcttacgaagtcgaccatactaggtttccccgcttcgaaggggagattaccatagataataaagtcagcgctgaagccaggaaactgctctgtgattctctcaagtttacggatcggctgtgtggagctctgtgcgtaatcaggttcgatgaatatacaccagcagccgatagtgggaaacaaaccgaaaatgtccaagcagaaccgaatgctaatctcgctgaaaagaccgcagagcaaattattagcattctggacgataataagaaaaccgaaaagacccgcctgcttgctgatgctattcgttcactccgccgctctagtaaacttgtcgctggcttgccaaaggatcatgacgggaaggatgaccattacctctgggatatcggcaagaagaagaaagacgaaaactctgtcactattaggcaaatccttacgacctcagcagacaccaaggaactcaagaatgccggaaaatggagagaattctgcgagaagctgggtgaagcgctgtacctcaagagtaaagacatgagtggcggcctgaaaattactcggagaatactgggcgatgctgaattccatggaaagcccgatcggcttgaaaagagccggtctgtgtcaatcggatctgtgttgaaagaaactgtggtatgcggcgaactggtcgctaaaacgcccttcttcttcggagcgatagacgaagatgcaaaacaaaccgacctgcaagtactcctcactcccgataacaagtatagactgccaagaagcgccgtgcgaggtatactccgtcgagatcttcaaacctattttgatagcccatgcaatgctgagttgggtggacggccatgcatgtgtaagacgtgtaggattatgagagggatcacggtgatggatgcgcgcagtgagtacaatgccccgccagaaataaggcatcgtacccgcattaatcccttcacaggcacggttgcggaaggtgccctgtttaatatggaagtagcccccgaggggattgtctttccatttcaactccggtaccggggctctgaagatgggctgcccgatgcactgaaaacggtgttgaaatggtgggctgaggggcaggcattcatgagtggcgctgcctcaaccgggaagggccgattccggatggaaaatgctaaatatgaaacgctggatctgagcgacgagaatcaaaggaatgactatcttaagaattggggatggcgtgacgagaaggggctcgaggaactgaagaaacgactgaactcaggtctgccagagcccggtaattatagggatccaaaatggcacgagattaacgtttccattgagatggcaagcccttttattaatggcgacccaatccgcgcagccgtggacaaacgtggtacagatgtggttaccttcgttaagtataaagctgaaggggaagaggcgaaacccgtatgtgcatacaaggccgaatcttttagaggggtgatcagaagtgccgtggcacgcattcatatggaagatggcgtccctttgactgagttgactcacagtgactgtgaatgtctcctgtgccaaatctttggaagtgagtatgaagccggcaaaataaggtttgaagatctcgtattcgaaagtgacccggaacctgtgaccttcgatcatgtggccatcgatagattcactggcggtgcagctgataagaagaaattcgatgattcccctctgcccggtagccctgcaagaccgctcatgttgaaaggctccttctggatccgcagggacgttctcgaggacgaagagtactgtaaggcactcggtaaggctcttgcagatgtgaataatggcctttatcccctcggtggaaagagcgccatcggctacggacaggtcaagagtctgggtataaagggagatgataagaggatttctcgcctcatgaatcctgcctttgatgagacagatgtagccgttccagaaaagcccaaaactgatgccgaggttcgcatcgaggcagagaaagtatattacccacactatttcgtcgaaccccataagaaggtggaacgcgaggagaaaccctgtggtcatcaaaagttccacgaggggcgactgacaggtaaaattcggtgtaagctcattaccaagacacccctcatcgtcccagatactagtaatgacgatttcttcagacctgcggataaagaagctcggaaggaaaaggacgaatatcataaatcatatgctttcttcagacttcataaacaaatcatgattcccgggagcgaattgagaggaatggtgagtagtgtctacgaaactgtgacaaattcttgcttcaggatatttgatgagactaaacggttgtcatggcgggggggtgggtcacgaactgtagacgataggatgatcggcaaacgtatgagcgccgatctgcggccgtgccatggagattgggtggaagatggtgatctcagtgccttgaatgcatatcccgagaaaagactcctcttgcgccaccccaaaggactctgccctgcttgccggctctttggaaccggatcttacaagggcagagtcaggtttggattcgcgtcactcgaaaacgatccggagtggctgatcccaggcaagaatcccggcgatccgtttcacggcgggccggtgatgctctcattgttggaacggcctcgcccgacttggagtataccgggatccgacaataagtttaaagtgcctggcagaaagttttacgtccaccaccacgcctggaaaaccattaaggacgggaaccatcccacaacaggcaaagctattgaacaaagccctaataaccgcactgtagaagctctcgccggcgggaattcctttagcttcgaaattgcctttgagaacctgaaagaatgggagctgggtttgctcatccacagcctgcaactcgaaaagggtctggcgcataaacttggaatggcaaagtctatgggatttggttcagttgaaattgacgtcgaatcagtgcgcctgagaaaagattggaagcaatggcggaatggcaattccgaaattcccaactggttgggaaaaggatttgctaaactgaaggaatggttccgggacgagctcgattttatagaaaatcttaagaaacttctttggtttcctgagggcgaccaagcaccccgggtttgctaccccatgctgcgaaagaaggacgatcctaatgggaatagcggttacgaagaactcaaaagaggggaattcaagaaagaagatcggcagaagaagctgaccacgccgtggacaccgtgggcaatggcggagtatctggcctccatcttcggcaccgagaaagacaaagtcaactgttcattttatttcaaaattggagcatgtcgtcatggagacaggtgctctcggttgcacaataaaccgacgtttagccagaccattgccctcttgaacatttaccgtaaccctcaaaactcttcccagtctgctgacggtttgcgctgtgccgtgagcgatgtggagatgcaggaacactatgatgagttttttgaggaggtttttacagaaatggaggagaagtatggggaagtagaggagatgaacgtctgtgacaacctgggagaccacctggtggggaacgtgtacgtcaagtttcgccgtgaggaagatgcggaaaaggctgtgattgacttgaataaccgttggtttaatggacagccgatccacgccgagctgtcacccgtgacggacttcagagaagcctgctgccgtcagtatgagatgggagaatgcacacgaggcggcttctgcaacttcatgcatttgaagcccatttccagagagctgcggcgggagctgtatggccgccgtcgcaagaagcatagatcaagatcccgatcccgggagcgtcgttctcggtctagagaccgtggtcgtggcggtggcggtggcggtggtggaggtggcggcggacgggagcgtgacaggaggcggtcgagagatcgtgaaagatctgggcgattcaaacggacagccgacggaagcgagttcgagtcaccaaagaagaagcggaaagtc

SEQ ID NO: 602 - DNA, 5403 bp, synthetic construct
  source 1..5403: mol_type = other DNA
atgaaacggacagccgacggaagcgagttcgagtcaccaaagaagaagcggaaagtcacgactactatgaagatttcaattgaattcctcgagccgtttcggatgaccaaatggcaggaaagcactaggcgaaacaagaacaacaaggaatttgttcgcggccaagcttttgcaagatggcatagaaataagaaggataacacaaaagggcggccttacataactgggacattgctgcggtccgcagtaattagaagcgcggaaaacctgctgacattgagtgatgggaaaattagcgaaaagacatgttgtcctgggaaatttgatacggaagataaagacaggttgctgcaattgaggcagcggtccacccttcgttggaccgataagaacccctgtccagataacgctgaaacttactgcccgttttgcgaacttctcgggagatccggtaacgatggaaagaaggctgagaagaaggattggcgctttcgtattcattttggcaatctttcccttccagggaagcccgatttcgacgggccaaaagctataggcagccaacgggtacttaacagggtcgatttcaaatccggtaaggcccatgacttctttaaggcttacgaagtcgaccatactaggtttccccgcttcgaaggggagattaccatagataataaagtcagcgctgaagccaggaaactgctctgtgattctctcaagtttacggatcggctgtgtggagctctgtgcgtaatcaggttcgatgaatatacaccagcagccgatagtgggaaacaaaccgaaaatgtccaagcagaaccgaatgctaatctcgctgaaaagaccgcagagcaaattattagcattctggacgataataagaaaaccgaaaagacccgcctgcttgctgatgctattcgttcactccgccgctctagtaaacttgtcgctggcttgccaaaggatcatgacgggaaggatgaccattacctctgggatatcggcaagaagaagaaagacgaaaactctgtcactattaggcaaatccttacgacctcagcagacaccaaggaactcaagaatgccggaaaatggagagaattctgcgagaagctgggtgaagcgctgtacctcaagagtaaagacatgagtggcggcctgaaaattactcggagaatactgggcgatgctgaattccatggaaagcccgatcggcttgaaaagagccggtctgtgtcaatcggatctgtgttgaaagaaactgtggtatgcggcgaactggtcgctaaaacgcccttcttcttcggagcgatagacgaagatgcaaaacaaaccgacctgcaagtactcctcactcccgataacaagtatagactgccaagaagcgccgtgcgaggtatactccgtcgagatcttcaaacctattttgatagcccatgcaatgctgagttgggtggacggccatgcatgtgtaagacgtgtaggattatgagagggatcacggtgatggatgcgcgcagtgagtacaatgccccgccagaaataaggcatcgtacccgcattaatcccttcacaggcacggttgcggaaggtgccctgtttaatatggaagtagcccccgaggggattgtctttccatttcaactccggtaccggggctctgaagatgggctgcccgatgcactgaaaacggtgttgaaatggtgggctgaggggcaggcattcatgagtggcgctgcctcaaccgggaagggccgattccggatggaaaatgctaaatatgaaacgctggatctgagcgacgagaatcaaaggaatgactatcttaagaattggggatggcgtgacgagaaggggctcgaggaactgaagaaacgactgaactcaggtctgccagagcccggtaattatagggatccaaaatggcacgagattaacgtttccattgagatggcaagcccttttattaatggcgacccaatccgcgcagccgtggacaaacgtggtacagatgtggttaccttcgttaagtataaagctgaaggggaagaggcgaaacccgtatgtgcatacaaggccgaatcttttagaggggtgatcagaagtgccgtggcacgcattcatatggaagatggcgtccctttgactgagttgactcacagtgactgtgaatgtctcctgtgccaaatctttggaagtgagtatgaagccggcaaaataaggtttgaagatctcgtattcgaaagtgacccggaacctgtgaccttcgatcatgtggccatcgatagattcactggcggtgcagctgataagaagaaattcgatgattcccctctgcccggtagccctgcaagaccgctcatgttgaaaggctccttctggatccgcagggacgttctcgaggacgaagagtactgtaaggcactcggtaaggctcttgcagatgtgaataatggcctttatcccctcggtggaaagagcgccatcggctacggacaggtcaagagtctgggtataaagggagatgataagaggatttctcgcctcatgaatcctgcctttgatgagacagatgtagccgttccagaaaagcccaaaactgatgccgaggttcgcatcgaggcagagaaagtatattacccacactatttcgtcgaaccccataagaaggtggaacgcgaggagaaaccctgtggtcatcaaaagttccacgaggggcgactgacaggtaaaattcggtgtaagctcattaccaagacacccctcatcgtcccagatactagtaatgacgatttcttcagacctgcggataaagaagctcggaaggaaaaggacgaatatcataaatcatatgctttcttcagacttcataaacaaatcatgattcccgggagcgaattgagaggaatggtgagtagtgtctacgaaactgtgacaaattcttgcttcaggatatttgatgagactaaacggttgtcatggcgggggggtgggtcacgaactgtagacgataggatgatcggcaaacgtatgagcgccgatctgcggccgtgccatggagattgggtggaagatggtgatctcagtgccttgaatgcatatcccgagaaaagactcctcttgcgccaccccaaaggactctgccctgcttgccggctctttggaaccggatcttacaagggcagagtcaggtttggattcgcgtcactcgaaaacgatccggagtggctgatcccaggcaagaatcccggcgatccgtttcacggcgggccggtgatgctctcattgttggaacggcctcgcccgacttggagtataccgggatccgacaataagtttaaagtgcctggcagaaagttttacgtccaccaccacgcctggaaaaccattaaggacgggaaccatcccacaacaggcaaagctattgaacaaagccctaataaccgcactgtagaagctctcgccggcgggaattcctttagcttcgaaattgcctttgagaacctgaaagaatgggagctgggtttgctcatccacagcctgcaactcgaaaagggtctggcgcataaacttggaatggcaaagtctatgggatttggttcagttgaaattgacgtcgaatcagtgcgcctgagaaaagattggaagcaatggcggaatggcaattccgaaattcccaactggttgggaaaaggatttgctaaactgaaggaatggttccgggacgagctcgattttatagaaaatcttaagaaacttctttggtttcctgagggcgaccaagcaccccgggtttgctaccccatgctgcgaaagaaggacgatcctaatgggaatagcggttacgaagaactcaaaagaggggaattcaagaaagaagatcggcagaagaagctgaccacgccgtggacaccgtgggcaatgtcggacttcgacgagttcgagcggcagctcaacgagaataaacaagagcgggacaaggagaaccggcatcggaagcgcagccacagccgctctcggagccgggaccgcaaacgccggagccggagccgcgaccggcgcaaccgggaccagcggagcgcctcccgggacaggcgacgacgcagcaaacctttgaccagaggcgctaaagaggagcacggtggactgattcgttccccccgccacgagaagaagaagaaggtccgtaaatactgggacgtgccacccccaggctttgagcacatcaccccaatgcagtacaaggccatgcaagctgcgggtcagattccagccactgctcttctccccaccatgacccctgacggtctggctgtgaccccaacgccggtgcccgtggtcgggagccagatgaccagacaagcccggcgcctctacgtgggcaacatcccctttggcatcactgaggaggccatgatggatttcttcaacgcccagatgcgcctgggggggctgacccaggcccctggcaacccagtgttggctgtgcagattaaccaggacaagaattttgcctttttggagttccgctcagtggacgagactacccaggctatggcctttgatggcatcatcttccagggccagtcactaaagatccgcaggcctcacgactaccagccgcttcctggcatgtcagagaacccctccgtctatgtgcctggggttgtgtccactgtggtccccgactctgcccacaagctgttcatcgggggcttacccaactacctgaacgatgaccaggtcaaagagctgctgacatcctttgggcccctcaaggccttcaacctggtcaaggacagtgccacggggctctccaagggctacgccttctgtgagtacgtggacatcaacgtcacggatcaggccattgcggggctgaacggcatgcagctgggggataagaagctgctggtccagagggcgagtgtgggagccaagaatgccacgctggtgagccccccgagcaccatcaatcagacgcctgtgaccctgcaagtgccgggcttgatgagctcccaggtgcagatgggcggccacccgactgaggtcctgtgcctcatgaacatggtgctgcctgaggagctgctggacgacgaggagtatgaggagatcgtggaggacgtgcgggacgagtgcagcaagtacgggcttgtcaagtccatcgagatcccccggcctgtggacggcgtcgaggtgcccggctgcggaaagatctttgtggagttcacctctgtgtttgactgccagaaagccatgcagggcctgacgggccgcaagttcgccaacagagtggttgtcacaaaatactgtgaccccgactcttatcaccgccgggacttctggaaacggacagccgacggaagcgagttcgagtcaccaaagaagaagcggaaagtc

SEQ ID NO: 603 - DNA, 5181 bp, synthetic construct
  source 1..5181: mol_type = other DNA
atgaaacggacagccgacggaagcgagttcgagtcaccaaagaagaagcggaaagtcacgactactatgaagatttcaattgaattcctcgagccgtttcggatgaccaaatggcaggaaagcactaggcgaaacaagaacaacaaggaatttgttcgcggccaagcttttgcaagatggcatagaaataagaaggataacacaaaagggcggccttacataactgggacattgctgcggtccgcagtaattagaagcgcggaaaacctgctgacattgagtgatgggaaaattagcgaaaagacatgttgtcctgggaaatttgatacggaagataaagacaggttgctgcaattgaggcagcggtccacccttcgttggaccgataagaacccctgtccagataacgctgaaacttactgcccgttttgcgaacttctcgggagatccggtaacgatggaaagaaggctgagaagaaggattggcgctttcgtattcattttggcaatctttcccttccagggaagcccgatttcgacgggccaaaagctataggcagccaacgggtacttaacagggtcgatttcaaatccggtaaggcccatgacttctttaaggcttacgaagtcgaccatactaggtttccccgcttcgaaggggagattaccatagataataaagtcagcgctgaagccaggaaactgctctgtgattctctcaagtttacggatcggctgtgtggagctctgtgcgtaatcaggttcgatgaatatacaccagcagccgatagtgggaaacaaaccgaaaatgtccaagcagaaccgaatgctaatctcgctgaaaagaccgcagagcaaattattagcattctggacgataataagaaaaccaggtatacccgcctgcttgctgatgctattcgttcactccgccgctctagtaaacttgtcgctggcttgccaaaggatcatgacgggaaggatgaccattacctctgggatatcggcaagaagaagaaagacgaaaactctgtcactattaggcaaatccttacgacctcagcagacaccaaggaactcaagaatgccggaaaatggagagaattctgcgagaagctgggtgaagcgctgtacctcaagagtaaagacatgagtggcggcctgaaaattactcggagaatactgggcgatgctgaattccatggaaagcccgatcggcttgaaaagagccggtctgtgtcaatcggatctgtgttgaaagaaactgtggtatgcggcgaactggtcgctaaaacgcccttcttcttcggagcgatagacgaagatgcaaaacaaaccgacctgcaagtactcctcactcccgataacaagtatagactgccaagaagcgccgtgcgaggtatactccgtcgagatcttcaaacctattttgatagcccatgcaatgctgagttgggtggacggccatgcatgtgtaagacgtgtaggattatgagagggatcacggtgatggatgcgcgcagtgagtacaatgccccgccagaaataaggcatcgtacccgcattaatcccttcacaggcacggttgcggaaggtgccctgtttaatatggaagtagcccccgaggggattgtctttccatttcaactccggtaccggggctctgaagatgggctgcccgatgcactgaaaacggtgttgaaatggtgggctgaggggcaggcattcatgagtggcgctgcctcaaccgggaagggccgattccggatggaaaatgctaaatatgaaacgctggatctgagcgacgagaatcaaaggaatgactatcttaagaattggggatggcgtgacgagaaggggctcgaggaactgaagaaacgactgaactcaggtctgccagagcccggtaattatagggatccaaaatggcacgagattaacgtttccattgagatggcaagcccttttattaatggcgacccaatccgcgcagccgtggacaaacgtggtacagatgtggttaccttcgttaagtataaagctgaaggggaagaggcgaaacccgtatgtgcatacaaggccgaatcttttagaggggtgatcagaagtgccgtggcacgcattcatatggaagatggcgtccctttgactgagttgactcacagtgactgtgaatgtctcctgtgccaaatctttggaagtgagtatgaagccggcaaaataaggtttgaagatctcgtattcgaaagtgacccggaacctgtgaccttcgatcatgtggccatcgatagattcactggcggtgcagctgataagaagaaattcgatgattcccctctgcccggtagccctgcaagaccgctcatgttgaaaggctccttctggatccgcagggacgttctcgaggacgaagagtactgtaaggcactcggtaaggctcttgcagatgtgaataatggcctttatcccctcggtggaaagagcgccatcggctacggacaggtcaagagtctgggtataaagggagatgataagaggatttctcgcctcatgaatcctgcctttgatgagacagatgtagccgttccagaaaagcccaaaactgatgccgaggttcgcatcgaggcagagaaagtatattacccacactatttcgtcgaaccccataagaaggtggaacgcgaggagaaaccctgtggtcatcaaaagttccacgaggggcgactgacaggtaaaattcggtgtaagctcattaccaagacacccctcatcgtcccagatactagtaatgacgatttcttcagacctgcggataaagaagctcggaaggaaaaggacgaatatcataaatcatatgctttcttcagacttcataaacaaatcatgattcccgggagcgaattgagaggaatggtgagtagtgtctacgaaactgtgacaaattcttgcttcaggatatttgatgagactaaacggttgtcatggcgggggggtgggtcacgaactgtagacgataggatgatcggcaaacgtatgagcgccgatctgcggccgtgccatggagattgggtggaagatggtgatctcagtgccttgaatgcatatcccgagaaaagactcctcttgcgccaccccaaaggactctgccctgcttgccggctctttggaaccggatcttacaagggcagagtcaggtttggattcgcgtcactcgaaaacgatccggagtggctgatcccaggcaagaatcccggcgatccgtttcacggcgggccggtgatgctctcattgttggaacggcctcgcccgacttggagtataccgggatccgacaataagtttaaagtgcctggcagaaagttttacgtccaccaccacgcctggaaaaccattaaggacgggaaccatcccacaacaggcaaagctattgaacaaagccctaataaccgcactgtagaagctctcgccggcgggaattcctttagcttcgaaattgcctttgagaacctgaaagaatgggagctgggtttgctcatccacagcctgcaactcgaaaagggtctggcgcataaacttggaatggcaaagtctatgggatttggttcagttgaaattgacgtcgaatcagtgcgcctgagaaaagattggaagcaatggcggaatggcaattccgaaattcccaactggttgggaaaaggatttgctaaactgaaggaatggttccgggacgagctcgattttatagaaaatcttaagaaacttctttggtttcctgagggcgaccaagcaccccgggtttgctaccccatgctgcgaaagaaggacgatcctaatgggaatagcggttacgaagaactcaaaagaggggaattcaagaaagaagatcggcagaagaagctgaccacgccgtggacaccgtgggcaatgtccctgtacgatgacctaggagtggagaccagtgactcaaaaacagaaggctggtccaaaaacttcaaacttctgcagtctcagcttcaggtgaagaaggcagctctcactcaggcaaagagccaaaggacgaaacaaagtacagtcctcgccccagtcattgacctgaagcgaggtggctcctcagatgaccggcaaattgtggacactccaccgcatgtagcagctgggctgaaggatcctgttcccagtgggttttctgcaggggaagttctgattcccttagctgacgaatatgaccctatgtttcctaatgattatgagaaagtagtgaagcgccaaagagaggaacgacagagacagcgggagctggaaagacaaaaggaaatagaagaaagggaaaaaaggcgtaaagacagacatgaagcaagtgggtttgcaaggagaccagatccagattctgatgaagatgaagattatgagcgagagaggaggaaaagaagtatgggcggagctgccattgccccacccacttctctggtagagaaagacaaagagttaccccgagattttccttatgaagaggactcaagacctcgatcacagtcttccaaagcagccattcctcccccagtgtacgaggaacaagacagaccgagatctccaaccggacctagcaactccttcctcgctaacatggggggcacggtggcgcacaagatcatgcagaagtacggcttccgggagggccagggtctggggaagcatgagcagggcctgagcactgccttgtcagtggagaagaccagcaagcgtggcggcaagatcatcgtgggcgacgccacagagaaagatgcatccaagaagtcagattcaaatccgctgactgaaatacttaagtgtcctactaaagtggtcttactaaggaacatggttggtgcgggagaggtggatgaagacttggaagttgaaaccaaggaagaatgtgaaaaatatggcaaagttggaaaatgtgtgatatttgaaattcctggtgcccctgatgatgaagcagtacggatatttttagaatttgagagagttgaatcagcaattaaagcggttgttgacttgaatgggaggtattttggtggacgggtggtaaaagcatgtttctacaatttggacaaattcagggtcttggatttggcagaacaagttaaacggacagccgacggaagcgagttcgagtcaccaaagaagaagcggaaagtc

SEQ ID NO: 604 - DNA, 4353 bp, synthetic construct
  source 1..4353: mol_type = other DNA
atgaaacggacagccgacggaagcgagttcgagtcaccaaagaagaagcggaaagtcacgactactatgaagatttcaattgaattcctcgagccgtttcggatgaccaaatggcaggaaagcactaggcgaaacaagaacaacaaggaatttgttcgcggccaagcttttgcaagatggcatagaaataagaaggataacacaaaagggcggccttacataactgggacattgctgcggtccgcagtaattagaagcgcggaaaacctgctgacattgagtgatgggaaaattagcgaaaagacatgttgtcctgggaaatttgatacggaagataaagacaggttgctgcaattgaggcagcggtccacccttcgttggaccgataagaacccctgtccagataacgctgaaacttactgcccgttttgcgaacttctcgggagatccggtaacgatggaaagaaggctgagaagaaggattggcgctttcgtattcattttggcaatctttcccttccagggaagcccgatttcgacgggccaaaagctataggcagccaacgggtacttaacagggtcgatttcaaatccggtaaggcccatgacttctttaaggcttacgaagtcgaccatactaggtttccccgcttcgaaggggagattaccatagataataaagtcagcgctgaagccaggaaactgctctgtgattctctcaagtttacggatcggctgtgtggagctctgtgcgtaatcaggttcgatgaatatacaccagcagccgatagtgggaaacaaaccgaaaatgtccaagcagaaccgaatgctaatctcgctgaaaagaccgcagagcaaattattagcattctggacgataataagaaaaccaggtatacccgcctgcttgctgatgctattcgttcactccgccgctctagtaaacttgtcgctggcttgccaaaggatcatgacgggaaggatgaccattacctctgggatatcggcaagaagaagaaagacgaaaactctgtcactattaggcaaatccttacgacctcagcagacaccaaggaactcaagaatgccggaaaatggagagaattctgcgagaagctgggtgaagcgctgtacctcaagagtaaagacatgagtggcggcctgaaaattactcggagaatactgggcgatgctgaattccatggaaagcccgatcggcttgaaaagagccggtctgtgtcaatcggatctgtgttgaaagaaactgtggtatgcggcgaactggtcgctaaaacgcccttcttcttcggagcgatagacgaagatgcaaaacaaaccgacctgcaagtactcctcactcccgataacaagtatagactgccaagaagcgccgtgcgaggtatactccgtcgagatcttcaaacctattttgatagcccatgcaatgctgagttgggtggacggccatgcatgtgtaagacgtgtaggattatgagagggatcacggtgatggatgcgcgcagtgagtacaatgccccgccagaaataaggcatcgtacccgcattaatcccttcacaggcacggttgcggaaggtgccctgtttaatatggaagtagcccccgaggggattgtctttccatttcaactccggtaccggggctctgaagatgggctgcccgatgcactgaaaacggtgttgaaatggtgggctgaggggcaggcattcatgagtggcgctgcctcaaccgggaagggccgattccggatggaaaatgctaaatatgaaacgctggatctgagcgacgagaatcaaaggaatgactatcttaagaattggggatggcgtgacgagaaggggctcgaggaactgaagaaacgactgaactcaggtctgccagagcccggtaattatagggatccaaaatggcacgagattaacgtttccattgagatggcaagcccttttattaatggcgacccaatccgcgcagccgtggacaaacgtggtacagatgtggttaccttcgttaagtataaagctgaaggggaagaggcgaaacccgtatgtgcatacaaggccgaatcttttagaggggtgatcagaagtgccgtggcacgcattcatatggaagatggcgtccctttgactgagttgactcacagtgactgtgaatgtctcctgtgccaaatctttggaagtgagtatgaagccggcaaaataaggtttgaagatctcgtattcgaaagtgacccggaacctgtgaccttcgatcatgtggccatcgatagattcactggcggtgcagctgataagaagaaattcgatgattcccctctgcccggtagccctgcaagaccgctcatgttgaaaggctccttctggatccgcagggacgttctcgaggacgaagagtactgtaaggcactcggtaaggctcttgcagatgtgaataatggcctttatcccctcggtggaaagagcgccatcggctacggacaggtcaagagtctgggtataaagggagatgataagaggatttctcgcctcatgaatcctgcctttgatgagacagatgtagccgttccagaaaagcccaaaactgatgccgaggttcgcatcgaggcagagaaagtatattacccacactatttcgtcgaaccccataagaaggtggaacgcgaggagaaaccctgtggtcatcaaaagttccacgaggggcgactgacaggtaaaattcggtgtaagctcattaccaagacacccctcatcgtcccagatactagtaatgacgatttcttcagacctgcggataaagaagctcggaaggaaaaggacgaatatcataaatcatatgctttcttcagacttcataaacaaatcatgattcccgggagcgaattgagaggaatggtgagtagtgtctacgaaactgtgacaaattcttgcttcaggatatttgatgagactaaacggttgtcatggcgggggggtgggtcacgaactgtagacgataggatgatcggcaaacgtatgagcgccgatctgcggccgtgccatggagattgggtggaagatggtgatctcagtgccttgaatgcatatcccgagaaaagactcctcttgcgccaccccaaaggactctgccctgcttgccggctctttggaaccggatcttacaagggcagagtcaggtttggattcgcgtcactcgaaaacgatccggagtggctgatcccaggcaagaatcccggcgatccgtttcacggcgggccggtgatgctctcattgttggaacggcctcgcccgacttggagtataccgggatccgacaataagtttaaagtgcctggcagaaagttttacgtccaccaccacgcctggaaaaccattaaggacgggaaccatcccacaacaggcaaagctattgaacaaagccctaataaccgcactgtagaagctctcgccggcgggaattcctttagcttcgaaattgcctttgagaacctgaaagaatgggagctgggtttgctcatccacagcctgcaactcgaaaagggtctggcgcataaacttggaatggcaaagtctatgggatttggttcagttgaaattgacgtcgaatcagtgcgcctgagaaaagattggaagcaatggcggaatggcaattccgaaattcccaactggttgggaaaaggatttgctaaactgaaggaatggttccgggacgagctcgattttatagaaaatcttaagaaacttctttggtttcctgagggcgaccaagcaccccgggtttgctaccccatgctgcgaaagaaggacgatcctaatgggaatagcggttacgaagaactcaaaagaggggaattcaagaaagaagatcggcagaagaagctgaccacgccgtggacaccgtgggcaatggcgatgcaagcggccaagagggcgaacattcgacttccacctgaagtaaatcggatattgtatataagaaatttgccatacaaaatcacagctgaagaaatgtatgatatatttgggaaatatggacctattcgtcaaatcagagtggggaacacacctgaaactagaggaacagcttatgtggtctatgaggacatctttgatgccaagaatgcatgtgatcacctatcgggattcaatgtttgtaacagataccttgtggttttgtactataatgccaacagggcatttcagaagatggacacaaagaagaaggaggaacagttgaagcttctcaaggagaaatatggcatcaacacagatccaccaaaaaaacggacagccgacggaagcgagttcgagtcaccaaagaagaagcggaaagtc

SEQ ID NO: 605 - DNA, 4698 bp, synthetic construct
  source 1..4698: mol_type = other DNA
atgaaacggacagccgacggaagcgagttcgagtcaccaaagaagaagcggaaagtcacgactactatgaagatttcaattgaattcctcgagccgtttcggatgaccaaatggcaggaaagcactaggcgaaacaagaacaacaaggaatttgttcgcggccaagcttttgcaagatggcatagaaataagaaggataacacaaaagggcggccttacataactgggacattgctgcggtccgcagtaattagaagcgcggaaaacctgctgacattgagtgatgggaaaattagcgaaaagacatgttgtcctgggaaatttgatacggaagataaagacaggttgctgcaattgaggcagcggtccacccttcgttggaccgataagaacccctgtccagataacgctgaaacttactgcccgttttgcgaacttctcgggagatccggtaacgatggaaagaaggctgagaagaaggattggcgctttcgtattcattttggcaatctttcccttccagggaagcccgatttcgacgggccaaaagctataggcagccaacgggtacttaacagggtcgatttcaaatccggtaaggcccatgacttctttaaggcttacgaagtcgaccatactaggtttccccgcttcgaaggggagattaccatagataataaagtcagcgctgaagccaggaaactgctctgtgattctctcaagtttacggatcggctgtgtggagctctgtgcgtaatcaggttcgatgaatatacaccagcagccgatagtgggaaacaaaccgaaaatgtccaagcagaaccgaatgctaatctcgctgaaaagaccgcagagcaaattattagcattctggacgataataagaaaaccaggtatacccgcctgcttgctgatgctattcgttcactccgccgctctagtaaacttgtcgctggcttgccaaaggatcatgacgggaaggatgaccattacctctgggatatcggcaagaagaagaaagacgaaaactctgtcactattaggcaaatccttacgacctcagcagacaccaaggaactcaagaatgccggaaaatggagagaattctgcgagaagctgggtgaagcgctgtacctcaagagtaaagacatgagtggcggcctgaaaattactcggagaatactgggcgatgctgaattccatggaaagcccgatcggcttgaaaagagccggtctgtgtcaatcggatctgtgttgaaagaaactgtggtatgcggcgaactggtcgctaaaacgcccttcttcttcggagcgatagacgaagatgcaaaacaaaccgacctgcaagtactcctcactcccgataacaagtatagactgccaagaagcgccgtgcgaggtatactccgtcgagatcttcaaacctattttgatagcccatgcaatgctgagttgggtggacggccatgcatgtgtaagacgtgtaggattatgagagggatcacggtgatggatgcgcgcagtgagtacaatgccccgccagaaataaggcatcgtacccgcattaatcccttcacaggcacggttgcggaaggtgccctgtttaatatggaagtagcccccgaggggattgtctttccatttcaactccggtaccggggctctgaagatgggctgcccgatgcactgaaaacggtgttgaaatggtgggctgaggggcaggcattcatgagtggcgctgcctcaaccgggaagggccgattccggatggaaaatgctaaatatgaaacgctggatctgagcgacgagaatcaaaggaatgactatcttaagaattggggatggcgtgacgagaaggggctcgaggaactgaagaaacgactgaactcaggtctgccagagcccggtaattatagggatccaaaatggcacgagattaacgtttccattgagatggcaagcccttttattaatggcgacccaatccgcgcagccgtggacaaacgtggtacagatgtggttaccttcgttaagtataaagctgaaggggaagaggcgaaacccgtatgtgcatacaaggccgaatcttttagaggggtgatcagaagtgccgtggcacgcattcatatggaagatggcgtccctttgactgagttgactcacagtgactgtgaatgtctcctgtgccaaatctttggaagtgagtatgaagccggcaaaataaggtttgaagatctcgtattcgaaagtgacccggaacctgtgaccttcgatcatgtggccatcgatagattcactggcggtgcagctgataagaagaaattcgatgattcccctctgcccggtagccctgcaagaccgctcatgttgaaaggctccttctggatccgcagggacgttctcgaggacgaagagtactgtaaggcactcggtaaggctcttgcagatgtgaataatggcctttatcccctcggtggaaagagcgccatcggctacggacaggtcaagagtctgggtataaagggagatgataagaggatttctcgcctcatgaatcctgcctttgatgagacagatgtagccgttccagaaaagcccaaaactgatgccgaggttcgcatcgaggcagagaaagtatattacccacactatttcgtcgaaccccataagaaggtggaacgcgaggagaaaccctgtggtcatcaaaagttccacgaggggcgactgacaggtaaaattcggtgtaagctcattaccaagacacccctcatcgtcccagatactagtaatgacgatttcttcagacctgcggataaagaagctcggaaggaaaaggacgaatatcataaatcatatgctttcttcagacttcataaacaaatcatgattcccgggagcgaattgagaggaatggtgagtagtgtctacgaaactgtgacaaattcttgcttcaggatatttgatgagactaaacggttgtcatggcgggggggtgggtcacgaactgtagacgataggatgatcggcaaacgtatgagcgccgatctgcggccgtgccatggagattgggtggaagatggtgatctcagtgccttgaatgcatatcccgagaaaagactcctcttgcgccaccccaaaggactctgccctgcttgccggctctttggaaccggatcttacaagggcagagtcaggtttggattcgcgtcactcgaaaacgatccggagtggctgatcccaggcaagaatcccggcgatccgtttcacggcgggccggtgatgctctcattgttggaacggcctcgcccgacttggagtataccgggatccgacaataagtttaaagtgcctggcagaaagttttacgtccaccaccacgcctggaaaaccattaaggacgggaaccatcccacaacaggcaaagctattgaacaaagccctaataaccgcactgtagaagctctcgccggcgggaattcctttagcttcgaaattgcctttgagaacctgaaagaatgggagctgggtttgctcatccacagcctgcaactcgaaaagggtctggcgcataaacttggaatggcaaagtctatgggatttggttcagttgaaattgacgtcgaatcagtgcgcctgagaaaagattggaagcaatggcggaatggcaattccgaaattcccaactggttgggaaaaggatttgctaaactgaaggaatggttccgggacgagctcgattttatagaaaatcttaagaaacttctttggtttcctgagggcgaccaagcaccccgggtttgctaccccatgctgcgaaagaaggacgatcctaatgggaatagcggttacgaagaactcaaaagaggggaattcaagaaagaagatcggcagaagaagctgaccacgccgtggacaccgtgggcaatggcggagtatctggcctccatcttcggcaccgagaaagacaaagtcaactgttcattttatttcaaaattggagcatgtcgtcatggagacaggtgctctcggttgcacaataaaccgacgtttagccagaccattgccctcttgaacatttaccgtaaccctcaaaactcttcccagtctgctgacggtttgcgctgtgccgtgagcgatgtggagatgcaggaacactatgatgagttttttgaggaggtttttacagaaatggaggagaagtatggggaagtagaggagatgaacgtctgtgacaacctgggagaccacctggtggggaacgtgtacgtcaagtttcgccgtgaggaagatgcggaaaaggctgtgattgacttgaataaccgttggtttaatggacagccgatccacgccgagctgtcacccgtgacggacttcagagaagcctgctgccgtcagtatgagatgggagaatgcacacgaggcggcttctgcaacttcatgcatttgaagcccatttccagagagctgcggcgggagctgtatggccgccgtcgcaagaagcatagatcaagatcccgatcccgggagcgtcgttctcggtctagagaccgtggtcgtggcggtggcggtggcggtggtggaggtggcggcggacgggagcgtgacaggaggcggtcgagagatcgtgaaagatctgggcgattcaaacggacagccgacggaagcgagttcgagtcaccaaagaagaagcggaaagtc

SEQ ID NO: 606 - DNA, 5403 bp, synthetic construct
  source 1..5403: mol_type = other DNA
atgaaacggacagccgacggaagcgagttcgagtcaccaaagaagaagcggaaagtcacgactactatgaagatttcaattgaattcctcgagccgtttcggatgaccaaatggcaggaaagcactaggcgaaacaagaacaacaaggaatttgttcgcggccaagcttttgcaagatggcatagaaataagaaggataacacaaaagggcggccttacataactgggacattgctgcggtccgcagtaattagaagcgcggaaaacctgctgacattgagtgatgggaaaattagcgaaaagacatgttgtcctgggaaatttgatacggaagataaagacaggttgctgcaattgaggcagcggtccacccttcgttggaccgataagaacccctgtccagataacgctgaaacttactgcccgttttgcgaacttctcgggagatccggtaacgatggaaagaaggctgagaagaaggattggcgctttcgtattcattttggcaatctttcccttccagggaagcccgatttcgacgggccaaaagctataggcagccaacgggtacttaacagggtcgatttcaaatccggtaaggcccatgacttctttaaggcttacgaagtcgaccatactaggtttccccgcttcgaaggggagattaccatagataataaagtcagcgctgaagccaggaaactgctctgtgattctctcaagtttacggatcggctgtgtggagctctgtgcgtaatcaggttcgatgaatatacaccagcagccgatagtgggaaacaaaccgaaaatgtccaagcagaaccgaatgctaatctcgctgaaaagaccgcagagcaaattattagcattctggacgataataagaaaaccaggtatacccgcctgcttgctgatgctattcgttcactccgccgctctagtaaacttgtcgctggcttgccaaaggatcatgacgggaaggatgaccattacctctgggatatcggcaagaagaagaaagacgaaaactctgtcactattaggcaaatccttacgacctcagcagacaccaaggaactcaagaatgccggaaaatggagagaattctgcgagaagctgggtgaagcgctgtacctcaagagtaaagacatgagtggcggcctgaaaattactcggagaatactgggcgatgctgaattccatggaaagcccgatcggcttgaaaagagccggtctgtgtcaatcggatctgtgttgaaagaaactgtggtatgcggcgaactggtcgctaaaacgcccttcttcttcggagcgatagacgaagatgcaaaacaaaccgacctgcaagtactcctcactcccgataacaagtatagactgccaagaagcgccgtgcgaggtatactccgtcgagatcttcaaacctattttgatagcccatgcaatgctgagttgggtggacggccatgcatgtgtaagacgtgtaggattatgagagggatcacggtgatggatgcgcgcagtgagtacaatgccccgccagaaataaggcatcgtacccgcattaatcccttcacaggcacggttgcggaaggtgccctgtttaatatggaagtagcccccgaggggattgtctttccatttcaactccggtaccggggctctgaagatgggctgcccgatgcactgaaaacggtgttgaaatggtgggctgaggggcaggcattcatgagtggcgctgcctcaaccgggaagggccgattccggatggaaaatgctaaatatgaaacgctggatctgagcgacgagaatcaaaggaatgactatcttaagaattggggatggcgtgacgagaaggggctcgaggaactgaagaaacgactgaactcaggtctgccagagcccggtaattatagggatccaaaatggcacgagattaacgtttccattgagatggcaagcccttttattaatggcgacccaatccgcgcagccgtggacaaacgtggtacagatgtggttaccttcgttaagtataaagctgaaggggaagaggcgaaacccgtatgtgcatacaaggccgaatcttttagaggggtgatcagaagtgccgtggcacgcattcatatggaagatggcgtccctttgactgagttgactcacagtgactgtgaatgtctcctgtgccaaatctttggaagtgagtatgaagccggcaaaataaggtttgaagatctcgtattcgaaagtgacccggaacctgtgaccttcgatcatgtggccatcgatagattcactggcggtgcagctgataagaagaaattcgatgattcccctctgcccggtagccctgcaagaccgctcatgttgaaaggctccttctggatccgcagggacgttctcgaggacgaagagtactgtaaggcactcggtaaggctcttgcagatgtgaataatggcctttatcccctcggtggaaagagcgccatcggctacggacaggtcaagagtctgggtataaagggagatgataagaggatttctcgcctcatgaatcctgcctttgatgagacagatgtagccgttccagaaaagcccaaaactgatgccgaggttcgcatcgaggcagagaaagtatattacccacactatttcgtcgaaccccataagaaggtggaacgcgaggagaaaccctgtggtcatcaaaagttccacgaggggcgactgacaggtaaaattcggtgtaagctcattaccaagacacccctcatcgtcccagatactagtaatgacgatttcttcagacctgcggataaagaagctcggaaggaaaaggacgaatatcataaatcatatgctttcttcagacttcataaacaaatcatgattcccgggagcgaattgagaggaatggtgagtagtgtctacgaaactgtgacaaattcttgcttcaggatatttgatgagactaaacggttgtcatggcgggggggtgggtcacgaactgtagacgataggatgatcggcaaacgtatgagcgccgatctgcggccgtgccatggagattgggtggaagatggtgatctcagtgccttgaatgcatatcccgagaaaagactcctcttgcgccaccccaaaggactctgccctgcttgccggctctttggaaccggatcttacaagggcagagtcaggtttggattcgcgtcactcgaaaacgatccggagtggctgatcccaggcaagaatcccggcgatccgtttcacggcgggccggtgatgctctcattgttggaacggcctcgcccgacttggagtataccgggatccgacaataagtttaaagtgcctggcagaaagttttacgtccaccaccacgcctggaaaaccattaaggacgggaaccatcccacaacaggcaaagctattgaacaaagccctaataaccgcactgtagaagctctcgccggcgggaattcctttagcttcgaaattgcctttgagaacctgaaagaatgggagctgggtttgctcatccacagcctgcaactcgaaaagggtctggcgcataaacttggaatggcaaagtctatgggatttggttcagttgaaattgacgtcgaatcagtgcgcctgagaaaagattggaagcaatggcggaatggcaattccgaaattcccaactggttgggaaaaggatttgctaaactgaaggaatggttccgggacgagctcgattttatagaaaatcttaagaaacttctttggtttcctgagggcgaccaagcaccccgggtttgctaccccatgctgcgaaagaaggacgatcctaatgggaatagcggttacgaagaactcaaaagaggggaattcaagaaagaagatcggcagaagaagctgaccacgccgtggacaccgtgggcaatgtcggacttcgacgagttcgagcggcagctcaacgagaataaacaagagcgggacaaggagaaccggcatcggaagcgcagccacagccgctctcggagccgggaccgcaaacgccggagccggagccgcgaccggcgcaaccgggaccagcggagcgcctcccgggacaggcgacgacgcagcaaacctttgaccagaggcgctaaagaggagcacggtggactgattcgttccccccgccacgagaagaagaagaaggtccgtaaatactgggacgtgccacccccaggctttgagcacatcaccccaatgcagtacaaggccatgcaagctgcgggtcagattccagccactgctcttctccccaccatgacccctgacggtctggctgtgaccccaacgccggtgcccgtggtcgggagccagatgaccagacaagcccggcgcctctacgtgggcaacatcccctttggcatcactgaggaggccatgatggatttcttcaacgcccagatgcgcctgggggggctgacccaggcccctggcaacccagtgttggctgtgcagattaaccaggacaagaattttgcctttttggagttccgctcagtggacgagactacccaggctatggcctttgatggcatcatcttccagggccagtcactaaagatccgcaggcctcacgactaccagccgcttcctggcatgtcagagaacccctccgtctatgtgcctggggttgtgtccactgtggtccccgactctgcccacaagctgttcatcgggggcttacccaactacctgaacgatgaccaggtcaaagagctgctgacatcctttgggcccctcaaggccttcaacctggtcaaggacagtgccacggggctctccaagggctacgccttctgtgagtacgtggacatcaacgtcacggatcaggccattgcggggctgaacggcatgcagctgggggataagaagctgctggtccagagggcgagtgtgggagccaagaatgccacgctggtgagccccccgagcaccatcaatcagacgcctgtgaccctgcaagtgccgggcttgatgagctcccaggtgcagatgggcggccacccgactgaggtcctgtgcctcatgaacatggtgctgcctgaggagctgctggacgacgaggagtatgaggagatcgtggaggacgtgcgggacgagtgcagcaagtacgggcttgtcaagtccatcgagatcccccggcctgtggacggcgtcgaggtgcccggctgcggaaagatctttgtggagttcacctctgtgtttgactgccagaaagccatgcagggcctgacgggccgcaagttcgccaacagagtggttgtcacaaaatactgtgaccccgactcttatcaccgccgggacttctggaaacggacagccgacggaagcgagttcgagtcaccaaagaagaagcggaaagtc

SEQ ID NO: 607 - DNA, 5376 bp, synthetic construct
  source 1..5376: mol_type = other DNA
atgaaacggacagccgacggaagcgagttcgagtcaccaaagaagaagcggaaagtcacgactactatgaagatttcaattgaattcctcgagccgtttcggatgaccaaatggcaggaaagcactaggcgaaacaagaacaacaaggaatttgttcgcggccaagcttttgcaagatggcatagaaataagaaggataacacaaaagggcggccttacataactgggacattgctgcggtccgcagtaattagaagcgcggaaaacctgctgacattgagtgatgggaaaattagcgaaaagacatgttgtcctgggaaatttgatacggaagataaagacaggttgctgcaattgaggcagcggtccacccttcgttggaccgataagaacccctgtccagataacgctgaaacttactgcccgttttgcgaacttctcgggagatccggtaacgatggaaagaaggctgagaagaaggattggcgctttcgtattcattttggcaatctttcccttccagggaagcccgatttcgacgggccaaaagctataggcagccaacgggtacttaacagggtcgatttcaaatccggtaaggcccatgacttctttaaggcttacgaagtcgaccatactaggtttccccgcttcgaaggggagattaccatagataataaagtcagcgctgaagccaggaaactgctctgtgattctctcaagtttacggatcggctgtgtggagctctgtgcgtaatcaggttcgatgaatatacaccagcagccgatagtgggaaacaaaccgaaaatgtccaagcagaaccgaatgctaatctcgctgaaaagaccgcagagcaaattattagcattctggacgataataagaaaaccgaatatacccgcctgcttgctgatgctattcgttcactccgccgctctagtaaacttgtcgctggcttgccaaaggatcatgacgggaaggatgaccataagctctgggatatcggcaagaagaagaaagacgaaaactctgtcactattaggcaaatccttacgacctcagcagacaccaaggaactcaagaatgccggaaaatggagagaattctgcgagaagctgggtgaagcgctgtacctcaagagtaaagacatgagtggcggcctgaaaattactcggagaatactgggcgatgctgaattccatggaaagcccgatcggcttgaaaagagccggtctgtgtcaatcggatctgtgttgaaagaaactgtggtatgcggcgaactggtcgctaaaacgcccttcttcttcggagcgatagacgaagatgcaaaacaaaccgacctgcaagtactcctcactcccgataacaagtatagactgccaagaagcgccgtgcgaggtatactccgtcgagatcttcaaacctattttgatagcccatgcaatgctgagttgggtggacggccatgcatgtgtaagacgtgtaggattatgagagggatcacggtgatggatgcgcgcagtgagtacaatgccccgccagaaataaggcatcgtacccgcattaatcccttcacaggcacggttgcggaaggtgccctgtttaatatggaagtagcccccgaggggattgtctttccatttcaactccggtaccggggctctgaagatgggctgcccgatgcactgaaaacggtgttgaaatggtgggctgaggggcaggcattcatgagtggcgctgcctcaaccgggaagggccgattccggatggaaaatgctaaatatgaaacgctggatctgagcgacgagaatcaaaggaatgactatcttaagaattggggatggcgtgacgagaaggggctcgaggaactgaagaaacgactgaactcaggtctgccagagcccggtaattatagggatccaaaatggcacgagattaacgtttccattgagatggcaagcccttttattaatggcgacccaatccgcgcagccgtggacaaacgtggtacagatgtggttaccttcgttaagtataaagctgaaggggaagaggcgaaacccgtatgtgcatacaaggccgaatcttttagaggggtgatcagaagtgccgtggcacgcattcatatggaagatggcgtccctttgactgagttgactcacagtgactgtgaatgtctcctgtgccaaatctttggaagtgagtatgaagccggcaaaataaggtttgaagatctcgtattcgaaagtgacccggaacctgtgaccttcgatcatgtggccatcgatagattcactggcggtgcagctgataagaagaaattcgatgattcccctctgcccggtagccctgcaagaccgctcatgttgaaaggctccttctggatccgcagggacgttctcgaggacgaagagtactgtaaggcactcggtaaggctcttgcagatgtgaataatggcctttatcccctcggtggaaagagcgccatcggctacggacaggtcaagagtctgggtataaagggagatgataagaggatttctcgcctcatgaatcctgcctttgatgagacagatgtagccgttccagaaaagcccaaaactgatgccgaggttcgcatcgaggcagagaaagtatattacccacactatttcgtcgaaccccataagaaggtggaacgcgaggagaaaccctgtggtcatcaaaagttccacgaggggcgactgacaggtaaaattcggtgtaagctcattaccaagacacccctcatcgtcccagatactagtaatgacgatttcttcagacctgcggataaagaagctcggaaggaaaaggacgaatatcataaatcatatgctttcttcagacttcataaacaaatcatgattcccgggagcgaattgagaggaatggtgagtagtgtctacgaaactgtgacaaattcttgcttcaggatatttgatgagactaaacggttgtcatggcggatggatgctgatcaccagaatgtgctgcaaaagtttctcccaggtcgagtgaccgccgatgggaaacatatacaaaagttttccgaaactgcaagggtgcctttctatgacaaaacgcagaaacattttgacattcttgatgagcaagaaattgctggtgagaaacctgttcggatgtgggtcaagcgttttattaaacgactgagcctcgttgatcctgctaaacacccccagaagaaacaagacaataaatggaaaagacgcaaagaaggcatcgccacatttatagagcaaaagaatggctcttattattttaacgtggtcaccaataatggctgcacttctttccacttgtggcataaacctgacaattttgaccaggagaaactcgaaggcatacagaatggtgagaaactggattgctgggtaagagatagtagataccaaaaggcctttcaagagatacccgagaacgacccagacggatgggagtgtaaagagggctaccttcatgtcgtcggccccagcaaagtagagtttagtgacaagaaaggggatgtgatcaataactttcaaggaacactcccatcagttcccaacgactggaaaacaattaggacgaacgattttaagaataggaaaaggaagaatgaacctgtgttttgttgtgaggatgataagggcaattactataccatggctaaatattgcgaaaccttcttcttcgatctgaaggagaacgaggaatacgagatccccgagaaagcaagaatcaaatacaaagaactgctcagggtctataacaacaatcctcaagcagtgccggagagcgtatttcagtctagagttgcccgggaaaacgtggaaaagctgaagtccggagatcttgtgtatttcaaacataatgaaaagtacgtagaggacatcgtcccagtgcggatttcccgaactgtagacgataggatgatcggcaaacgtatgagcgccgatctgcggccgtgccatggagattgggtggaagatggtgatctcagtgccttgaatgcatatcccgagaaaagactcctcttgcgccaccccaaaggactctgccctgcttgccggctctttggaaccggatcttacaagggcagagtcaggtttggattcgcgtcactcgaaaacgatccggagtggctgatcccaggcaagaatcccggcgatccgtttcacggcgggccggtgatgctctcattgttggaacggcctcgcccgacttggagtataccgggatccgacaataagtttaaagtgcctggcagaaagttttacgtccaccaccacgcctggaaaaccattaaggacgggaaccatcccacaacaggcaaagctattgaacaaagccctaataaccgcactgtagaagctctcgccggcgggaattcctttagcttcgaaattgcctttgagaacctgaaagaatgggagctgggtttgctcatccacagcctgcaactcgaaaagggtctggcgcataaacttggaatggcaaagtctatgggatttggttcagttgaaattgacgtcgaatcagtgcgcctgagaaaagattggaagcaatggcggaatggcaattccgaaattcccaactggttgggaaaaggatttgctaaactgaaggaatggttccgggacgagctcgattttatagaaaatcttaagaaacttctttggtttcctgagggcgaccaagcaccccgggtttgctaccccatgctgcgaaagaaggacgatcctaatgggaatagcggttacgaagaactcaaaagaggggaattcaagaaagaagatcggcagaagaagctgaccacgccgtggacaccgtgggcaaaacggacagccgacggaagcgagttcgagtcaccaaagaagaagcggaaagtctgtacaggcagtggagagggcagaggaagtctgctaacatgcggtgacgtcgaggagaatcctggcccaatggccaagcctttgtctcaagaagaatccaccctcattgaaagagcaacggctacaatcaacagcatccccatctctgaagactacagcgtcgccagcgcagctctctctagcgacggccgcatcttcactggtgtcaatgtatatcattttactgggggaccttgtgcagaactcgtggtgctgggcactgctgctgctgcggcagctggcaacctgacttgtatcgtcgcgatcggaaatgagaacaggggcatcttgagcccctgcggacggtgccgacaggtgcttctcgatctgcatcctgggatcaaagccatagtgaaggacagtgatggacagccgacggcagttgggattcgtgaattgctgccctctggttatgtgtgggagggc

SEQ ID NO: 608 - DNA, 3978 bp, synthetic construct
  source 1..3978: mol_type = other DNA
atgaaacggacagccgacggaagcgagttcgagtcaccaaagaagaagcggaaagtcacgactactatgaagatttcaattgaattcctcgagccgtttcggatgaccaaatggcaggaaagcactaggcgaaacaagaacaacaaggaatttgttcgcggccaagcttttgcaagatggcatagaaataagaaggataacacaaaagggcggccttacataactgggacattgctgcggtccgcagtaattagaagcgcggaaaacctgctgacattgagtgatgggaaaattagcgaaaagacatgttgtcctgggaaatttgatacggaagataaagacaggttgctgcaattgaggcagcggtccacccttcgttggaccgataagaacccctgtccagataacgctgaaacttactgcccgttttgcgaacttctcgggagatccggtaacgatggaaagaaggctgagaagaaggattggcgctttcgtattcattttggcaatctttcccttccagggaagcccgatttcgacgggccaaaagctataggcagccaacgggtacttaacagggtcgatttcaaatccggtaaggcccatgacttctttaaggcttacgaagtcgaccatactaggtttccccgcttcgaaggggagattaccatagataataaagtcagcgctgaagccaggaaactgctctgtgattctctcaagtttacggatcggctgtgtggagctctgtgcgtaatcaggttcgatgaatatacaccagcagccgatagtgggaaacaaaccgaaaatgtccaagcagaaccgaatgctaatctcgctgaaaagaccgcagagcaaattattagcattctggacgataataagaaaaccgaaaagacccgcctgcttgctgatgctattcgttcactccgccgctctagtaaacttgtcgctggcttgccaaaggatcatgacgggaaggatgaccattacctctgggatatcggcaagaagaagaaagacgaaaactctgtcactattaggcaaatccttacgacctcagcagacaccaaggaactcaagaatgccggaaaatggagagaattctgcgagaagctgggtgaagcgctgtacctcaagagtaaagacatgagtggcggcctgaaaattactcggagaatactgggcgatgctgaattccatggaaagcccgatcggcttgaaaagagccggtctgtgtcaatcggatctgtgttgaaagaaactgtggtatgcggcgaactggtcgctaaaacgcccttcttcttcggagcgatagacgaagatgcaaaacaaaccgacctgcaagtactcctcactcccgataacaagtatagactgccaagaagcgccgtgcgaggtatactccgtcgagatcttcaaacctattttgatagcccatgcaatgctgagttgggtggacggccatgcatgtgtaagacgtgtaggattatgagagggatcacggtgatggatgcgcgcagtgagtacaatgccccgccagaaataaggcatcgtacccgcattaatcccttcacaggcacggttgcggaaggtgccctgtttaatatggaagtagcccccgaggggattgtctttccatttcaactccggtaccggggctctgaagatgggctgcccgatgcactgaaaacggtgttgaaatggtgggctgaggggcaggcattcatgagtggcgctgcctcaaccgggaagggccgattccggatggaaaatgctaaatatgaaacgctggatctgagcgacgagaatcaaaggaatgactatcttaagaattggggatggcgtgacgagaaggggctcgaggaactgaagaaacgactgaactcaggtctgccagagcccggtaattatagggatccaaaatggcacgagattaacgtttccattgagatggcaagcccttttattaatggcgacccaatccgcgcagccgtggacaaacgtggtacagatgtggttaccttcgttaagtataaagctgaaggggaagaggcgaaacccgtatgtgcatacaaggccgaatcttttagaggggtgatcagaagtgccgtggcacgcattcatatggaagatggcgtccctttgactgagttgactcacagtgactgtgaatgtctcctgtgccaaatctttggaagtgagtatgaagccggcaaaataaggtttgaagatctcgtattcgaaagtgacccggaacctgtgaccttcgatcatgtggccatcgatagattcactggcggtgcagctgataagaagaaattcgatgattcccctctgcccggtagccctgcaagaccgctcatgttgaaaggctccttctggatccgcagggacgttctcgaggacgaagagtactgtaaggcactcggtaaggctcttgcagatgtgaataatggcctttatcccctcggtggaaagagcgccatcggctacggacaggtcaagagtctgggtataaagggagatgataagaggatttctcgcctcatgaatcctgcctttgatgagacagatgtagccgttccagaaaagcccaaaactgatgccgaggttcgcatcgaggcagagaaagtatattacccacactatttcgtcgaaccccataagaaggtggaacgcgaggagaaaccctgtggtcatcaaaagttccacgaggggcgactgacaggtaaaattcggtgtaagctcattaccaagacacccctcatcgtcccagatactagtaatgacgatttcttcagacctgcggataaagaagctcggaaggaaaaggacgaatatcataaatcatatgctttcttcagacttcataaacaaatcatgattcccgggagcgaattgagaggaatggtgagtagtgtctacgaaactgtgacaaattcttgcttcaggatatttgatgagactaaacggttgtcatggcgggggggtgggtcacgaactgtagacgataggatgatcggcaaacgtatgagcgccgatctgcggccgtgccatggagattgggtggaagatggtgatctcagtgccttgaatgcatatcccgagaaaagactcctcttgcgccaccccaaaggactctgccctgcttgccggctctttggaaccggatcttacaagggcagagtcaggtttggattcgcgtcactcgaaaacgatccggagtggctgatcccaggcaagaatcccggcgatccgtttcacggcgggccggtgatgctctcattgttggaacggcctcgcccgacttggagtataccgggatccgacaataagtttaaagtgcctggcagaaagttttacgtccaccaccacgcctggaaaaccattaaggacgggaaccatcccacaacaggcaaagctattgaacaaagccctaataaccgcactgtagaagctctcgccggcgggaattcctttagcttcgaaattgcctttgagaacctgaaagaatgggagctgggtttgctcatccacagcctgcaactcgaaaagggtctggcgcataaacttggaatggcaaagtctatgggatttggttcagttgaaattgacgtcgaatcagtgcgcctgagaaaagattggaagcaatggcggaatggcaattccgaaattcccaactggttgggaaaaggatttgctaaactgaaggaatggttccgggacgagctcgattttatagaaaatcttaagaaacttctttggtttcctgagggcgaccaagcaccccgggtttgctaccccatgctgcgaaagaaggacgatcctaatgggaatagcggttacgaagaactcaaaagaggggaattcaagaaagaagatcggcagaagaagctgaccacgccgtggacaccgtgggcaaaacggacagccgacggaagcgagttcgagtcaccaaagaagaagcggaaagtc

SEQ ID NO: 609 - DNA, 1205 bp, synthetic construct
  source 1..1205: mol_type = other DNA
atgaaggggcagcagaaaacagctgaaacggaagaggggacagtgcagattcaggaaggtgcagtggctactggggaagacccaaccagtgtggctattgccagcatccagtcagctgccaccttccctgaccccaacgtcaagtacgtcttccgaactgagaatgggggccaggtgatgtacagggtgatccaggtgtctgaggggcagctggatggccaaactgagggaactggcgccatcagtggctaccctgccactcaatccatgacccaggcggtgatccagggtgctttcaccagtgatgatgcagttgacacggaggggacagctgctgagacgcactatacttacttccccagcacggcagtgggagatggggcagggggtaccacatcggggagtacagctgctgttgttactacccagggctcagaggcactgctggggcaggcgacccctcctggcactggtcaattctttgtgatgatgtcaccacaagaagtactgcagggaggaagccagcgctcaattgcccctaggactcacccttattccccgaagtcagaagctccccggacgactcgggatgagaaacgcagggctcagcataatgaagtggagcgtcgccgccgagacaagatcaacaactggatcgtgcagctctccaagataatcccagactgctctatggagagcaccaagtctggccaggtcatggaaagaccctggtagtgggcaggatgcctgaattctgcctcctggtattgtttccagaaatggtagagagaggggcacacatgacagtagtcttatctctccctgaggttcctgtatccctgggagatattataccaccttccttagatgaaaatgaggtccaaagtgtgaacctacttttggaaagcaagctgggtatctgaaatcctagttctcattttgttgaccttatcttgcagagtaaaggtgggattctatccaaagcttgtgattatatccaggagcttcggcagagtaaccaccgcttgtctgaagaactgcagggacttgaccaactgcagctggacaatgacgtgcttcgacaacaggtggaagatcttaaaaacaagaatctgctgcttcgagctcagttgcggcaccacggattagaggtcgtcatcaagaatgacagcaactacccatacgatgttccagattacgcttaa

SEQ ID NO: 610 - DNA, 31 bp, synthetic construct
  source 1..31: mol_type = other DNA
aacgaggaattctcttcttttttttctgcag

SEQ ID NO: 611 - DNA, 18 bp, synthetic construct
  source 1..18: mol_type = other DNA
tttttttttttttttttt
